(19) United States
(12) Patent Application Publication
(10) Pub. No.: US 2013/0227743 A1
(43) Pub. Date: Aug. 29, 2013

(54) INTEGRATED METHOD FOR HIGH-THROUGHPUT IDENTIFICATION OF NOVEL PESTICIDAL COMPOSITIONS AND USES THEREFOR

(71) Applicants: Christopher J. Grandlic, San Diego, CA (US); Toby H. Richardson, San Diego, CA (US); Janne S. Kerovuo, San Diego, CA (US); Ariel Schwartz, San Diego, CA (US)

(72) Inventors: Christopher J. Grandlic, San Diego, CA (US); Toby H. Richardson, San Diego, CA (US); Janne S. Kerovuo, San Diego, CA (US); Ariel Schwartz, San Diego, CA (US)

(21) Appl. No.: 13/588,621

(22) Filed: Aug. 17, 2012

Related U.S. Application Data
(60) Provisional application No. 61/525,674, filed on Aug. 19, 2011.

(51) Int. Cl. C12N 15/82; C12Q 1/68

(52) U.S. Cl. CPC C12N 15/8286; C12Q 1/6876
USPC 800/279; 435/6.11; 536/24.32; 536/23.71; 435/252.3; 435/419; 800/302; 530/350; 514/4.5; 435/252.31; 435/252.34

(57) ABSTRACT

Methods to rapidly identify nucleic acid sequences encoding novel biotoxins are provided. Particularly, methods to rapidly sample and screen extrachromosomal genetic content of microorganisms for novel sequences of interest are described. Compositions comprising coding sequences for biotoxins, and polypeptides and uses derived therefrom are provided. Compositions and methods are useful, for example, for conferring pesticidal activity to bacteria, plants, plant cells, tissues, and seeds.

### CROSS-REFERENCES TO RELATED APPLICATIONS

[0001] This application claims priority under 35 U.S.C. §119(e) to U.S. Provisional Patent Application No. 61/525,674, filed on Aug. 19, 2011, the entire contents of which is herein incorporated by reference.

### INCORPORATION OF SEQUENCE LISTING

[0002] The material in the accompanying Sequence Listing is hereby incorporated by reference in its entirety. The accompanying file, named “SGI1530-1_ST25.txt”, was created on Aug. 17, 2012 and is 832 Kb. The file can be accessed using Microsoft Word on a computer that uses Window OS.

### FIELD OF THE INVENTION

[0003] This invention relates generally to the field of molecular biology. More specifically, the invention relates to the identification of biotoxin-encoding gene sequences and uses thereof.

### BACKGROUND OF THE INVENTION

[0004] Many species of microorganisms, particularly spore-forming gram positive bacterial strains inhabiting soils and other complex ecological communities, produce a wide spectrum of proteinaceous toxins that increase their ability to survive and proliferate. Many of such bacteria often carry extrachromosomal genetic elements including plasmids and episomes that can include a variety of genes. Often, these plasmid-encoded and episome-encoded genes give the strain of a given bacterium important characteristics. For instance, one of the most widely used biocidal pesticides is Crystal (Cry), a protein encoded by extrachromosomal genetic content of subspecies and strains of Bacillus thuringiensis (Bt). To date, a wide variety of Bacillus thuringiensis (Bt) strains and Bt-derived compounds have been used as microbial pesticides. The Bt spores contain crystals, which predominantly comprise one or more Cry and/or Cyt proteins (also known as β-endotoxins), have potent and specific insecticidal activity against various lepidopteran pests. Bt toxins have been used as topical pesticides to protect crops, and more recently the proteins have been expressed in transgenic plants to confer pest resistance. The genes responsible for the production of the insecticidal proteins by these bacterial strains are encoded by extrachromosomal DNA.

[0005] While the use of microbial toxins and the genes encoding them in various agricultural applications has become increasingly popular in the past two decades, it remains a cumbersome process to discover and characterize microbial toxin genes with promising potentials for commercial application. Microorganisms represent the largest component of the living world and are widely considered to represent the single largest source of evolutionary and biochemical diversity on the planet. In fact, the total number of microbial cells on Earth is estimated to be at least 10³⁰. Prokaryotes represent the largest proportion of individual organisms, comprising 10⁶ to 10⁸ separate genospecies. In addition, enormous genetic diversity among bacterial extrachromosomal DNA has been reported. Therefore, these microbial genetic materials with tremendous biodiversity remain a largely untapped reservoir of novel genes and compounds with potentials for commercial applications. However, the currently available methods for screening for commercially viable genes from microbes often cannot be applied efficiently to these under-explored resources. For example, the approaches currently used to screen for new crystal toxin proteins of Bacillae species have been largely unchanged since the inception of the field, and primarily relies on time-consuming and rather slow throughput methods. Traditional approaches to identify commercially viable genes and proteins have typically relied on following the function of interest. Typically, new isolates of spore-forming Bacillae are collected from environments, and subsequently subjected to a lengthy multi-step characterization process including (1) microscopic analysis for identification of crystal protein forming strains, (2) nematode and insect feeding and killing assays, (3) degenerative PCR analysis and primer walking to recover full-length toxin gene sequences. A major drawback in such an approach is not only the low throughput, extensive time and effort needed but the fact that discovered gene sequences are determined only after all the effort is already put in.

[0006] Newer genomics approaches have attempted to sequence genes as quickly as possible and identify their function by homology to known genes. Efforts to characterize the genomes of microorganisms have been ongoing since tools of molecular biology became available for this purpose. To achieve a much higher sequencing throughput requires technological revolution; therefore numerous commercial companies and scientific labs have come up with many different ways of achieving ultra-high-throughput sequencing. These approaches often involve sequencing and assembling the entire genome of microorganisms, followed by a genome-wide gene annotation before new toxin-encoding sequences can potentially be identified. However, since many of toxin genes reside in the extrachromosomal portion of microbial genome, it remains unclear how efficient it is to sequence entire genomes of a given organism for the purpose of identifying new genetic elements with commercial value. There have been few systematic efforts to characterize genetic materials carried by extrachromosomal DNA of microorganisms, and to use such characterization as a means to rapidly identify microbial genes with commercial applications. One such systematic approach is previously described in U.S. Pat. Appln. No. 20100298207 in which the extrachromosomal DNA content of bacterial strains that could possibly harbor toxin genes of interest was individually extracted, sequenced, assembled, and annotated before toxin genes could be identified. However, further improvements are needed because this approach required that individual microbial strains were isolated and characterized, and the extrachromosomal nucleic acids were isolated from individually cultured strains. In addition, a labor-intensive cloning effort was needed when all DNA libraries were constructed, sequenced and annotated separately and individually for the identification of novel toxin genes in individually processed samples.

[0007] Metagenomics is one of today's fastest-developing research areas. The term is derived from the statistical concept of meta-analysis (the process of statistically combining separate analyses) and genomics (the comprehensive analysis of an organism's genetic material). To date, conventional metagenomics is often defined as the application of high-throughput sequencing to DNA obtained directly from environmental samples or series of related samples by bypassing the requirement for obtaining pure cultures for sequencing. To some extent, conventional metagenomics is a derivation of microbial genomics, with the key difference being that it bypasses the requirement for obtaining pure cultures for sequencing. In addition, the samples are obtained from communities rather than isolated populations.

[0008] Although metagenomics has been used successfully to identify enzymes with desired activities, it has relied primarily on relatively low-throughput function-based screening or sequence-based screening of environmental DNA clones libraries. Sequence-based metagenomic discovery of complete genes from environmental samples has been limited by microbial species complexity of most environments and the consequent rarity of full-length genes in low-coverage metagenomic assemblies.

[0009] Therefore, novel methods are needed to facilitate the rapid and efficient identification of useful nucleotide sequences carried by the extrachromosomal DNA content of microorganisms. Particularly, there is a need to identify more microbial toxin genes with commercial relevance and to do so rapidly and efficiently. One aspect of the present invention provides an integrated screening method as a solution to this long felt need by providing a method to rapidly and efficiently capture the genetic diversity from microorganism genomes and identify novel toxin-encoding sequences of commercial interest, without the need for labor-intensive and relatively low-throughput cloning or sequencing the entire genome of the microorganisms.

### SUMMARY OF THE INVENTION

[0010] Methods to rapidly and highly efficient identification of gene sequences encoding biotoxin in microorganisms are described in the present disclosure. Particularly, methods to rapidly sample and screen extrachromosomal genetic content of microorganisms for novel sequences of interest are provided. Isolated nucleic acid molecules encoding novel biotoxins and compositions containing such nucleic acid molecules are also provided in the disclosure. Additionally provided are compositions and methods for conferring pesticidal activity to cells and organisms, for example, microorganisms, plants, plant cells, tissues, and seeds. The nucleic acid sequences and molecules according to the present disclosure can be used in, for examples, making DNA constructs or expression cassettes suitable for transformation and expression in host organisms, including microorganisms and plants. The nucleic acid molecules may also contain synthetic sequences that are designed for optimal expression in a target organism including, but not limited to, a microorganism or a plant. Additionally, polypeptides corresponding to the nucleic acid molecules, methods to produce such polypeptides, and antibodies specifically binding to those polypeptides are also encompassed in the present disclosure.

[0011] One aspect of the present invention relates to methods for identifying a nucleic acid sequence encoding a biotoxin. The methods include (a) generating a mixed population of extrachromosomal DNA molecules from a plurality of microbial isolates, (b) establishing a metagenomic sequence dataset comprising nucleic acid sequences derived from said mixed population of extrachromosomal DNA molecules, (c) processing sequence data of said metagenomic sequence dataset to define at least one nucleic acid sequence contig, and (d) identifying a nucleic acid sequence that encodes a biotoxin by comparing said at least one nucleic acid sequence contig from step (c) with known biotoxin sequences.

[0012] In some embodiments, the methods according to this aspect of the invention may further include a step of determining the taxonomic classification of the microbial isolates. In some embodiments, the plurality of microbial isolates may be pre-selected for the ability to produce at least one biotoxin. In some preferred embodiments, the methods according to this aspect of the present invention may further include a step of determining whether the nucleic acid sequence identified from step (d) encodes a novel biotoxin. In one embodiment, the nucleic acid sequence of the novel toxin may share less than 30% identity with any known biotoxin sequence. In some embodiments, the nucleic acid sequence of the novel toxin may share less than 60%, or less than 70%, or less than 80%, or less than 90%, or less than 95%, or less than 98%, or less than 99% sequence identity with any known biotoxin sequence. In certain embodiments of the methods according to this aspect, the plurality of microbial isolates includes at least 12 microbial isolates. In some embodiments, the plurality of microbial isolates includes at least 24, or at least 48, or at least 50, or at least 96, or at least 200, or at least 384, or at least 400, or at least 500, or at least 1500 microbial isolates. In a preferred embodiment of this aspect, at least one of the microbial isolates is a bacterium. The bacterium may be, but not limited to, of the following genera Bacillus, Brevibacillus, Clostridia, Paenibacillus, Photorhabdus, Pseudomonas, Serratia, Streptomyces, and Xenorhabdus. In yet other embodiments of this aspect, the metagenomic sequence dataset may be constructed by a direct sequencing procedure that excludes molecular cloning.

[0013] Also provided according to another aspect of the present invention are isolated nucleic acid molecules which comprise a nucleic acid sequence that is identified by a method of high-throughput gene identification disclosed herein.

[0014] In yet another aspect, the present disclosure provides isolated nucleic acid molecules comprising nucleic acid sequences that hybridize under high stringency conditions to any one of the nucleotide sequences in the Sequence Listing, complements of nucleotide sequences that hybridize under high stringency conditions to any of the nucleotide sequences in the Sequence Listing, and fragments of either; or nucleic acid sequences that exhibit 70% or greater sequence identity to any one of the nucleotide sequences in the Sequence Listing, complements of the nucleotide sequences exhibiting 70% or greater sequence identity to any one of the nucleotide sequences in the Sequence Listing, and fragments of either; or nucleic acid sequences that encode amino acid sequences exhibiting 50% or greater sequence identity to any one of the amino acid sequences in the Sequence Listing.

[0015] The disclosure also provides nucleic acid constructs that include the polynucleotides provided herein. The nucleic acid constructs include a heterologous nucleic acid operably linked to a nucleic acid molecule that comprises a nucleic acid sequence corresponding to any one of the nucleotide sequences in the Sequence Listing; or a nucleic acid sequence hybridizing under high stringency conditions to any one of the nucleotide sequences in the Sequence Listing, a complement thereof or a fragment of either; or a nucleic acid sequence exhibiting 70% or greater sequence identity to any one of the nucleotide sequences in the Sequence Listing, a complement thereof or a fragment of either; or a nucleic acid sequence encoding a polypeptide that exhibits 50% or greater sequence identity to any one of the amino acid sequences in the Sequence Listing. In some preferred embodiment, the heterologous nucleic acid is a heterologous promoter. In some other preferred embodiments, the nucleic acid constructs according to this aspect of the present invention are vector constructs. Such vector constructs are useful for transformation and expression of the polynucleotides and polypeptides according to the present invention in transgenic cells and transgenic organisms including, but not limited to, transgenic plants and transgenic microorganisms.

[0016] In another aspect, the present disclosure further provides a host cell including a nucleic acid construct that comprises a heterologous nucleic acid operably linked to a nucleic acid molecule that comprises a nucleic acid sequence corresponding to any one of the nucleotide sequences in the Sequence Listing; or a nucleic acid sequence hybridizing under high stringency conditions to any one of the nucleotide sequences in the Sequence Listing, a complement thereof or a fragment of either; or a nucleic acid sequence exhibiting 70% or greater sequence identity to any one of the nucleotide sequences in the Sequence Listing, a complement thereof or a fragment of either; or a nucleic acid sequence encoding a polypeptide that exhibits 50% or greater sequence identity to any one of the amino acid sequences in the Sequence Listing. In some preferred embodiments of this aspect, such host cell may be a plant cell or a microbial cell.

[0017] The disclosure also provides host organisms containing host cells that include a nucleic acid construct which comprises a heterologous nucleic acid operably linked to a nucleic acid molecule comprising a nucleic acid sequence corresponding to any one of the nucleotide sequences in the Sequence Listing; or a nucleic acid sequence hybridizing under high stringency conditions to any one of the nucleotide sequences in the Sequence Listing, a complement thereof or a fragment of either; or a nucleic acid sequence exhibiting 70% or greater sequence identity to any one of the nucleotide sequences in the Sequence Listing, a complement thereof or a fragment of either; or a nucleic acid sequence encoding a polypeptide that exhibits 50% or greater sequence identity to any one of the amino acid sequences in the Sequence Listing. In some preferred embodiments of this aspect, such host organism may be a plant or a microorganism. The present disclosure also provides biological samples and progeny derived from the host organisms described above.

[0018] In another aspect of the present invention, there is disclosed a method for conferring pesticidal activity to an organism. The method includes introducing into the organism a nucleic acid molecule that includes a nucleic acid sequence corresponding to any one of the nucleotide sequences in the Sequence Listing; or a nucleic acid sequence hybridizing under high stringency conditions to any one of the nucleotide sequences in the Sequence Listing, a complement thereof or a fragment of either; a nucleic acid sequence exhibiting 70% or greater sequence identity to any one of the nucleotide sequences in the Sequence Listing, a complement thereof or a fragment of either; or a nucleic acid sequence encoding a polypeptide that exhibits 50% or greater sequence identity to any one of the amino acid sequences in the Sequence Listing. In a preferred embodiment, the nucleic acid molecule is transcribed and results in an elevated resistance of the organism to a pest as compared to a control organism.

[0019] In yet another aspect, the disclosure further provides isolated polypeptides. The isolated polypeptides are encoded by a nucleic acid molecule including a nucleic acid sequence corresponding to any one of the nucleotide sequences in the Sequence Listing; or a nucleic acid sequence hybridizing under high stringency conditions to any one of the nucleotide sequences in the Sequence Listing, a complement thereof or a fragment of either; or a nucleic acid sequence exhibiting 70% or greater sequence identity to any one of the nucleotide sequences in the Sequence Listing, a complement thereof or a fragment of either; or a nucleic acid sequence encoding a polypeptide that exhibits 50% or greater sequence identity to any one of the amino acid sequences in the Sequence Listing. In some preferred embodiments of this aspect, the polypeptides may have a pesticidal activity.

[0020] In another aspect of the invention, there are provided compositions comprising a polypeptide encoded by a nucleic acid molecule that comprises a nucleic acid sequence corresponding to any one of the nucleotide sequences in the Sequence Listing; or a nucleic acid sequence hybridizing under high stringency conditions to any one of the nucleotide sequences in the Sequence Listing, a complement thereof or a fragment of either; or a nucleic acid sequence exhibiting 70% or greater sequence identity to any one of the nucleotide sequences in the Sequence Listing, a complement thereof or a fragment of either; or a nucleic acid sequence encoding a polypeptide that exhibits 50% or greater sequence identity to any one of the amino acid sequences in the Sequence Listing. The compositions according to this aspect of the invention may further include one or more of the following features. The polypeptide can be an isolated polypeptide. The polypeptide may have a pesticidal activity. The compositions may further include a carrier. Such carrier may be an agriculturally acceptable carrier. The compositions may additionally comprise an agriculturally effective amount of a pesticidal compound or composition. The additional compound or composition may be an acaricide, a bactericide, a fungicide, an insecticide, a microbicide, a nematicide, a pesticide, or a fertilizer. The compositions may be prepared as a formulation which may be an emulsion, a colloid, a dust, a granule, a pellet, a powder, a spray, or a solution. The compositions may be prepared by centrifugation, concentration, desiccation, extraction, filtration, homogenization, or sedimentation of a culture of microbial cells. In yet other embodiments, the compositions may include from about 1% to about 99% by weight of a polypeptide provided herein.

[0021] Also provided in another aspect of the invention is a method for controlling a pest. The method includes contacting or feeding a pest with a pesticidally-effective amount of a polypeptide of the invention as described herein.

[0022] In yet another aspect of the invention, provided is a method for producing a polypeptide having pesticidal activity. The method includes culturing a host cell comprising a nucleic acid molecule encoding any one of the polypeptides of the invention as described herein, under conditions in which the nucleic acid molecule is expressed. As such, the polypeptides may be encoded by a nucleic acid molecule that comprises a nucleic acid sequence corresponding to any one of the nucleotide sequences in the Sequence Listing; or a nucleic acid sequence hybridizing under high stringency conditions to any one of the nucleotide sequences in the Sequence Listing, a complement thereof or a fragment of either; or a nucleic acid sequence exhibiting 70% or greater sequence identity to any one of the nucleotide sequences in the Sequence Listing, a complement thereof or a fragment of either; or a nucleic acid sequence encoding a polypeptide that exhibits 50% or greater sequence identity to any one of the amino acid sequences in the Sequence Listing.

[0023] Also provided in the present disclosure are purified antibodies that specifically bind to any one of the polypeptides provided herein or a pesticidal fragment thereof. The polypeptides may be encoded by a nucleic acid molecule that comprises a nucleic acid sequence corresponding to any one of the nucleotide sequences in the Sequence Listing; or a nucleic acid sequence hybridizing under high stringency conditions to any one of the nucleotide sequences in the Sequence Listing, a complement thereof or a fragment of either; or a nucleic acid sequence exhibiting 70% or greater sequence identity to any one of the nucleotide sequences in the Sequence Listing, a complement thereof or a fragment of either; or a nucleic acid sequence encoding a polypeptide that exhibits 50% or greater sequence identity to any one of the amino acid sequences in the Sequence Listing.

[0024] These and other objects and features of the invention will become more fully apparent from the following detailed description of the invention and the claims.

### DETAILED DESCRIPTION OF THE INVENTION

[0025] The present invention relates to compositions and methods useful for modulating pest resistance in organisms, particularly plants or plant cells. Methods to rapidly and efficiently identify gene sequences encoding novel biotoxin are provided. Particularly, methods to rapidly sample and screen extrachromosomal genetic content of microorganisms for novel sequences of interest are described. Isolated nucleic acid molecules encoding novel biotoxins and compositions containing such nucleic acid molecules are also provided in the disclosure. Additionally, compositions and methods for conferring pesticidal activity to bacteria, plants, plant cells, tissues, and seeds are also provided. Additionally, amino acid sequences corresponding to the polynucleotides are encompassed, and antibodies specifically binding to those amino acid sequences are also provided.

[0026] Particularly, the nucleic acid molecules of the invention can be used in, for example, the construction of expression vectors for subsequent transformation into organisms of interest, as probes for the isolation of other toxin genes, and for the generation of altered pesticidal proteins by methods known in the art, such as domain swapping or DNA shuffling. The nucleic acid sequences or amino acid sequences may also be synthetic sequences that are designed for optimal expression in a target organism including, but not limited to, a microorganism or a plant. The polypeptides of the invention find use in controlling or killing pest population, particularly lepidopteran, coleopteran, and nematode pest populations, as well as use in the production of compositions with pesticidal activity.

[0027] Additionally, microbial cells and plant cells produced using a method in accordance with the present disclosure may be used to produce biomass, microbial products, plant products, e.g., food, feed, biofuel, cosmetic, medicinal, neutraceutical, nutritional, or pharmaceutical products.

[0028] Unless otherwise defined, all terms of art, notations and other scientific terms or terminology used herein are intended to have the meanings commonly understood by those of skill in the art to which this invention pertains. In some cases, terms with commonly understood meanings are defined herein for clarity and/or for ready reference, and the inclusion of such definitions herein should not necessarily be construed to represent a substantial difference over what is generally understood in the art. Many of the techniques and procedures described or referenced herein are well understood and commonly employed using conventional methodology by those skilled in the art.

[0029] The singular form “a”, “an”, and “the” include plural references unless the context clearly dictates otherwise. For example, the term “a cell” includes one or more cells, including mixtures thereof.

[0030] Amino acid: As used herein, the term “amino acid” refers to naturally occurring and synthetic amino acids, as well as amino acid analogs and amino acid mimetics that function in a manner similar to the naturally occurring amino acids. Naturally occurring amino acids are those encoded by the genetic code, including D/L optical isomers, as well as those amino acids that are later modified, e.g., hydroxyproline, y-carboxyglutamate, and O-phosphoserine. Amino acid analogs refer to compounds that have the same basic chemical structure as a naturally occurring amino acid, i.e., a carbon that is bound to a hydrogen, a carboxyl group, an amino group, and an R group, e.g., homoserine, norleucine, methionine sulfoxide, methionine methyl sulfonium. Such analogs have modified R groups (e.g., norleucine) or modified peptide backbones, but retain the same basic chemical structure as a naturally occurring amino acid. Amino acid mimetics refer to chemical compounds that have a structure that is different from the general chemical structure of an amino acid, but that functions in a manner similar to a naturally occurring amino acid.

[0031] The term “biotoxin” or “toxin”, as used interchangeably herein, is intended to refer to a polypeptide that has toxic activity against one or more pests including, but not limited to, insect pests such as, for example, members of the Lepidoptera, Diptera, and Coleoptera orders, and nematode members of the Nematoda phylum; or a functional homolog of such a polypeptide. The term “biotoxin” is sometimes used to explicitly confirm the biological origin. In some cases, biotoxin proteins are isolated from Bacillus sp. In other embodiments, the toxins can be isolated from other microbial genera, including Clostridium and Paenibacillus. Toxin proteins include amino acid sequences deduced from the full-length nucleotide sequences disclosed herein, and amino acid sequences that are shorter than the full-length sequences, either due to the use of an alternate downstream start site, or due to processing that produces a shorter protein having pesticidal activity. Processing may occur in the organism the protein is expressed in, or in the pest after ingestion of the protein.

[0032] Composition: A “composition” is intended to mean a combination of active agent and another compound, carrier or composition, inert (for example, a detectable agent or label or liquid carrier) or active, such as a pesticide.

[0033] The terms “control” or “controlling” or grammatical equivalents thereof, as used herein in reference to a pesticidal treatment, are understood to encompass any pesticidal activities or pestistatic (inhibiting, repelling, deterring, preventing, and generally interfering with pest functions to prevent the damage to the host plant) activities of a pesticidal composition against a given pest to effect changes in pest feeding, growth, and/or behavior at any stage of development, including, but not limited to, killing the insect, retarding growth, preventing reproductive capability, and the like. Thus, the terms “control” or “controlling” or grammatical equivalents thereof, not only include killing, but also include such activities as repelling, preventing, deterring, inhibiting or killing egg development or hatching, inhibiting maturation or development, and sterilization of larvae or adult pests.

[0034] Control organism: A “control organism” as used in the present invention provides a reference point for measuring changes in phenotype of the subject organism or cell, may be any suitable organism or cell. A control organism or cell may comprise, for example, (a) a wild-type organism or cell, i.e., of the same genotype as the starting material for the genetic alteration which resulted in the subject organism or cell; (b) an organism or cell of the same genotype as the starting material but which has been transformed with a null construct (i.e. a construct which has no known effect on the trait of interest, such as a construct comprising a reporter gene); (c) an organism or cell which is a non-transformed segregant among progeny of a subject organism or cell; (d) an organism or cell which is genetically identical to the subject organism or cell but which is not exposed to the same treatment (e.g., pesticide treatment) as the subject organism or cell; (e) the subject organism or cell itself, under conditions in which the gene of interest is not expressed; or (f) the subject organism or cell itself, under conditions in which it has not been exposed to a particular treatment such as, for example, a pesticide or combination of pesticides and/or other chemicals. In some instances, the term “control organism” refers to an organism or cell used to compare against transgenic or genetically modified organism for the purpose of identifying a modulated phenotype in the transgenic or genetically modified organism. A “control organism” may in some cases refer to an organism that does not contain the exogenous nucleic acid present in the transgenic organism of interest, but otherwise has the same of similar genetic background as such a transgenic organism. In some other instances, an appropriate control organism or cell as used herein may have a different genotype from the subject organism or cell but may share the pesticide-sensitive characteristics of the starting material for the genetic alteration(s) which resulted in the subject organism or cell. For example, a “control plant”, as used for the purpose of this disclosure, refers to a plant cell, seed, plant component, plant tissue, plant organ or whole plant used to compare against transgenic or genetically modified plant for the purpose of identifying a modulated phenotype in the transgenic or genetically modified plant. A “control plant” may in some cases refer to a plant that does not contain the exogenous nucleic acid present in the transgenic plant of interest, but otherwise has the same of similar genetic background as such a transgenic plant. A suitable control plant can be a genetically unaltered or non-transgenic plant of the parental line used to generate a subject transgenic plant. A suitable control plant in some cases can be a non-transgenic segregant from a transformation experiment, or a transgenic plant that contains an exogenous nucleic acid other than the exogenous nucleic acid of interest.

[0035] Culturing: The term “culturing”, as used herein, refers to the propagation of a cell or organism on or in media of various kinds such as, for example, liquid, semi-solid or solid medium under suitable conditions wherein the cell or organism can carry out some, if not all, biological processes. For example, a cell that is cultured may be growing or reproducing, and capable of carrying out biological and/or biochemical processes including but not limited to replication, transcription, translation.

[0036] Domain: “Domains” are groups of substantially contiguous amino acids in a polypeptide that can be used to characterize protein families and/or parts of proteins. Such domains have a “fingerprint” or “signature” that can comprise conserved primary sequence, secondary structure, and/or three-dimensional conformation. Generally, domains are correlated with specific in vitro and/or in vivo activities. A domain can have a length of from 4 amino acids to 400 amino acids, e.g., 4 to 50 amino acids, or 4 to 20 amino acids, or 4 to 10 amino acids, or 4 to 8 amino acids, or 25 to 100 amino acids, or 35 to 65 amino acids, or 35 to 55 amino acids, or 45 to 60 amino acids, or 200 to 300 amino acids, or 300 to 400 amino acids. As disclosed in greater detail elsewhere herein, conserved regions and conserved domains that are indicative of biotoxin activity have been described extensively in scientific and patent literature.

[0037] Effective amount: As used herein, an “effective amount” is an amount sufficient to affect beneficial or desired results. An effective amount can be administered in one or more administrations. In term of pest and/or disease management, treatment, inhibition or protection, an effective amount is that amount sufficient to suppress, stabilize, reverse, slow or delay progression of the target pest infection or disease states. As such, the expression “pesticidally-effective amount” is used herein in reference to that quantity of pesticide treatment which is necessary to obtain a reduction in the level of pest development and/or in the level of pest infection relative to that occurring in an untreated control. For each pesticidal substance or organism, the pesticidally effective amount can be determined empirically for each pest affected in a specific environment. Typically, an effective amount of a given pesticide treatment provides a reduction of at least 20%; or more typically, between 30 to 40%; more typically, between 50-60%; even more typically, between 70 to 80%; and even more typically, between 90 to 95%, relative to the level of pest infection and/or the level of pest development occurring in an untreated control under suitable conditions of treatment. As mentioned above, a pesticidally-effective amount can be administered in one or more administrations.

[0038] Exogenous: the “exogenous” when used in reference to a nucleic acid indicates that the nucleic acid is part of a recombinant nucleic acid construct and is not in its natural environment. For example, an exogenous nucleic acid can be a sequence from one species introduced into another species, i.e., a heterologous nucleic acid. Typically, such an exogenous nucleic acid is introduced into the other species via a recombinant nucleic acid construct. An exogenous nucleic acid can also be a sequence that is native to an organism and that has been reintroduced into cells of that organism. An exogenous nucleic acid that includes a native sequence can often be distinguished from the naturally-occurring sequence by the presence of non-natural sequences linked to the exogenous nucleic acid, e.g., non-native regulatory sequences flanking a native sequence in a recombinant nucleic acid construct. In addition, stably transformed exogenous nucleic acids can be integrated at positions other than the position where the native sequence is found. It will be appreciated that an exogenous nucleic acid may have been introduced into a progenitor, and not into the cell under consideration. For example, a transgenic plant containing an exogenous nucleic acid can be the progeny of a cross between a stably transformed plant and a non-transgenic plant. Such progeny are considered to contain the exogenous nucleic acid.

[0039] Expression: As used herein, “expression” refers to the process of converting genetic information of a polynucleotide into RNA through transcription, which is typically catalyzed by an enzyme, RNA polymerase, and into protein, through translation of mRNA on ribosomes.

[0040] Functional homolog: The term “functional homolog” as used herein describes those proteins that have at least one characteristic in common. Such characteristics include sequence similarity, biochemical activity, transcriptional pattern similarity and phenotypic activity. Typically, a functional homolog is a polypeptide that has sequence similarity to a reference polypeptide, and that carries out one or more of the biochemical or physiological function(s) of the reference polypeptide. Functional homologs will typically give rise to the same characteristics to a similar, but not necessarily the same, degree. Typically, functionally homologous proteins give the same characteristics where the quantitative measurement due to one of the homologs is at least 20% of the other; more typically, between 30 to 40%; more typically, between 50-60%; even more typically, between 70 to 80%; even more typically, between 90 to 95%; even more typically, between 98 to 100% of the other.

[0041] A functional homolog and the reference polypeptide may be naturally occurring polypeptides, and the sequence similarity may be due to convergent or divergent evolutionary events. As such, functional homologs are sometimes designated in the literature as homologs, orthologs, or paralogs. Variants of a naturally-occurring functional homolog, such as polypeptides encoded by mutants or a wild-type coding sequence, may themselves be functional homologs. As used herein, functional homologs can also be created via site-directed mutagenesis of the coding sequence for a biotoxin polypeptide, or by combining domains from the coding sequences for different naturally-occurring biotoxin polypeptides. The term “functional homolog” sometimes applied to the nucleic acid that encodes a functionally homologous polypeptide.

[0042] Functional homologs can be identified by analysis of nucleotide and polypeptide sequence alignments. For example, performing a query on a database of nucleotide or polypeptide sequences can identify homologs of biotoxin polypeptides. Sequence analysis can involve BLAST, Reciprocal BLAST, or PSI-BLAST analysis of non-redundant databases using amino acid sequence of an AHAS polypeptide as the reference sequence. Amino acid sequence is, in some instances, deduced from the nucleotide sequence. Typically, those polypeptides in the database that have greater than 40% sequence identity are candidates for further evaluation for suitability as a biotoxin polypeptide. Amino acid sequence similarity allows for conservative amino acid substitutions, such as substitution of one hydrophobic residue for another or substitution of one polar residue for another. If desired, manual inspection of such candidates can be carried out in order to narrow the number of candidates to be further evaluated. Manual inspection can be performed by selecting those candidates that appear to have domains present in biotoxin polypeptides, e.g., conserved functional domains.

[0043] Conserved regions can be identified by locating a region within the primary amino acid sequence of a biotoxin polypeptide that is a repeated sequence, forms some secondary structure (e.g., helices and beta sheets), establishes positively or negatively charged domains, or represents a protein motif or domain. See, e.g., the Pfam web site describing consensus sequences for a variety of protein motifs and domains on the World Wide Web at sanger.ac.uk/Software/Pfam/and pfam.janelia.org/. A description of the information included at the Pfam database is described in, for example, Sonnhammer et al. (Nucl. Acids Res., 26:320-322, 1998), Sonnhammer et al. (Proteins, 28:405-420, 1997); and Bateman et al. (Nucl. Acids Res., 27:260-262, 1999). Conserved regions also can be determined by aligning sequences of the same or related polypeptides from closely related species. Closely related species preferably are from the same family. In some embodiments, alignment of sequences from two different species is adequate. As disclosed in greater detail elsewhere herein, conserved regions and conserved functional domains that are indicative of biotoxin activity have been described extensively in scientific and patent literature.

[0044] Typically, polypeptides that exhibit at least about 40% amino acid sequence identity are useful to identify conserved regions. Conserved regions of related polypeptides exhibit at least 45% amino acid sequence identity (e.g., at least 50%, at least 60%, at least 70%, at least 80%, or at least 90% amino acid sequence identity). In some embodiments, a conserved region exhibits at least 92%, 94%, 96%, 98%, or 99% amino acid sequence identity.

[0045] Heterologous sequences: the term “heterologous sequences”, as used herein, encompasses heterologous polypeptides and heterologous nucleic acids, and refers to those sequences that are not operatively linked or are not contiguous to each other in nature. For example, a promoter from wheat is considered heterologous to a Bacillus thuringiensis coding region sequence. Also, a promoter from a gene encoding a growth factor from wheat is considered heterologous to a sequence encoding the wheat receptor for the growth factor. Regulatory element sequences, such as UTRs or 3′ end termination sequences that do not originate in nature from the same gene as the coding sequence, are considered heterologous to said coding sequence. Elements operatively linked in nature and contiguous to each other are not heterologous to each other. On the other hand, these same elements remain operatively linked but become heterologous if other filler sequence is placed between them. Thus, the promoter and coding sequences of a wheat gene expressing an amino acid transporter are not heterologous to each other, but the promoter and coding sequence of a wheat gene operatively linked in a novel manner are heterologous.

[0046] The term “hybridization”, as used herein, refers generally to the ability of nucleic acid molecules to join via complementary base strand pairing. Nucleic acid molecules or fragment thereof of the present invention are capable of specifically hybridizing to other nucleic acid molecules under certain circumstances. As used herein, two nucleic acid molecules are said to be capable of specifically hybridizing to one another if the two molecules are capable of forming an anti-parallel, double-stranded nucleic acid structure. A nucleic acid molecule is said to be the “complement” of another nucleic acid molecule if they exhibit complete complementarity. As used herein, molecules are said to exhibit “complete complementarity” when every nucleotide of one of the molecules is complementary to a nucleotide of the other. Two molecules are said to be “minimally complementary” if they can hybridize to one another with sufficient stability to permit them to remain annealed to one another under at least conventional “low-stringency” conditions. Similarly, the molecules are said to be “complementary” if they can hybridize to one another with sufficient stability to permit them to remain annealed to one another under conventional “high-stringency” conditions. Conventional stringency conditions are described by Sambrook et al., In: Molecular Cloning, A Laboratory Manual, 2nd Edition, Cold Spring Harbor Press, Cold Spring Harbor, N.Y. (1989), and by Haymes et al. In: Nucleic Acid Hybridization, A Practical Approach, IRL Press, Washington, D.C. (1985). Departures from complete complementarity are therefore permissible, as long as such departures do not completely preclude the capacity of the molecules to form a double-stranded structure. Thus, in order for a nucleic acid molecule or fragment of the present invention to serve as a primer or probe it needs only be sufficiently complementary in sequence to be able to form a stable double-stranded structure under the particular solvent and salt concentrations employed.

[0047] Appropriate stringency conditions which promote DNA hybridization include, for example, 6.0× sodium chloride/sodium citrate (SSC) at about 45° C., followed by a wash of 2.0×SSC at about 50° C. In addition, the temperature in the wash step can be increased from low stringency conditions at room temperature, about 22° C., to high stringency conditions at about 65° C. Both temperature and salt may be varied, or either the temperature or the salt concentration may be held constant while the other variable is changed. Information in this regard can be found in Current Protocols in Molecular Biology, John Wiley & Sons, N.Y. (1989), 6.3.1-6.3.6. For example, low stringency conditions may be used to select nucleic acid sequences with lower sequence identities to a target nucleic acid sequence. One may wish to employ conditions such as about 0.15 M to about 0.9 M sodium chloride, at temperatures ranging from about 20° C. to about 55° C. High stringency conditions may be used to select for nucleic acid sequences with higher degrees of identity to the disclosed nucleic acid sequences (Sambrook et al., 1989, supra). High stringency conditions generally involve nucleic acid hybridization in about 2×SSC to about 10×SSC (diluted from a 20×SSC stock solution containing 3 M sodium chloride and 0.3 M sodium citrate, pH 7.0 in distilled water), about 2.5× to about 5×Denhardt's solution (diluted from a 50× stock solution containing 1% (w/v) bovine serum albumin, 1% (w/v) ficoll, and 1% (w/v) polyvinylpyrrolidone in distilled water), about 10 mg/mL to about 100 mg/mL fish sperm DNA, and about 0.02% (w/v) to about 0.1% (w/v) SDS, with an incubation at about 50° C. to about 70° C. for several hours to overnight. Hybridization is typically followed by several wash steps. These wash steps are typically performed by gradually increasing the stringency and comprise 0.5×SSC to about 10×SSC, and 0.01% (w/v) to about 0.5% (w/v) SDS with a 15-min incubation at about 20° C. to about 70° C. Preferably, the nucleic acid segments remain hybridized after washing at least one time in 0.1×SSC at 65° C. In a preferred embodiment, high stringency conditions are provided by pre-hybridization and hybridization at 65° C. in 5×SSC, 5×Denhardt's solution, 100 μg/mL sheared and denatured salmon sperm DNA, and 1% (w/v) SDS for at least three hours, and washing twice with 2×SSC, 0.2% SDS at 65° C.

[0048] According to some embodiments of the present application, nucleic acid molecules of the present invention preferably comprise a nucleic acid sequence that hybridizes, under low or high stringency conditions, to any one of the nucleic acid sequences in the Sequence Listing, or any complements thereof, or any fragments of either.

[0049] Isolated molecule and substantially purified molecule: an “isolated” or “purified” nucleic acid molecule or protein, or biologically active portion thereof, is substantially free of other cellular material, or culture medium when produced by recombinant techniques, or substantially free of chemical precursors or other chemicals when chemically synthesized. The term “substantially purified”, as used herein, refers to a molecule separated from substantially all other molecules normally associated with it in its native state. More preferably a substantially purified molecule is the predominant species present in a preparation that is, or results, however indirect, from human manipulation of a polynucleotide or polypeptide. A substantially purified molecule may be greater than 60% free, preferably 75% free, more preferably 90% free, and most preferably 95% free from the other molecules (exclusive of solvent) present in the natural mixture. The term “substantially purified” does not encompass molecules present in their native state. For nucleic acids, an “isolated” nucleic acid preferably is free of sequences that naturally flank the nucleic acid (i.e., sequences located at the 5′ and 3′ ends of the nucleic acid) in the cell of the organism from which the nucleic acid is derived. Thus, “isolated nucleic acid” as used herein includes a naturally-occurring nucleic acid, provided one or both of the sequences immediately flanking that nucleic acid in its naturally-occurring genome is removed or absent. Thus, an isolated nucleic acid includes, without limitation, a nucleic acid that exists as a purified molecule or a nucleic acid molecule that is incorporated into a vector or a recombinant organism. A nucleic acid existing among hundreds to millions of other nucleic acids within, for example, cDNA libraries, genomic libraries, or gel slices containing a genomic DNA restriction digest, is not to be considered an isolated nucleic acid. For purposes of the invention, “isolated” when used to refer to nucleic acid molecules also excludes isolated chromosomes. For example, in various embodiments, the isolated toxin encoding nucleic acid molecule can contain less than about 5 kb, 4 kb, 3 kb, 2 kb, 1 kb, 0.5 kb, or 0.1 kb of nucleotide sequences that naturally flank the nucleic acid molecule in the cell from which the nucleic acid is derived. A toxin protein that is substantially free of cellular material includes preparations of protein having less than about 30%, 20%, 10%, or 5% (by dry weight) of non-toxin protein (typically referred to herein as a “contaminating protein”).

[0050] The terms “microbial isolate” or “isolated microbial strain”, as used interchangeably herein, refer to a particular species, genus, family, order, or class of microorganism obtained or derived from a sample having more than one microorganism or from a mixed population or microorganisms. As used herein, the term “isolated” as applied to a microorganism (e.g., bacterium or microfungus) refers to a microorganism which has been removed and/or purified from an environment in which it naturally occurs. As such, an “isolated microbial strain” as used herein is a strain that has been removed and/or purified from its natural milieu. Thus, an “isolated” microorganism does not include one residing in an environment in which it naturally occurs. Further, the term “isolated” does not necessarily reflect the extent to which the microbe has been purified. A “substantially pure culture” of the strain of microbe refers to a culture which contains substantially no other microbes than the desired strain or strains of microbe. In other words, a substantially pure culture of a strain of microbe is substantially free of other contaminants, which can include microbial contaminants as well as undesirable chemical contaminants. Further, as used herein, a “biologically pure” strain is intended to mean the strain separated from materials with which it is normally associated in nature. Note that a strain associated with other strains, or with compounds or materials that it is not normally found with in nature, is still defined as “biologically pure.” A monoculture of a particular strain is, of course, “biologically pure.” As used herein, the term “enriched culture” of an isolated microbial strain refers to a microbial culture that contains more than 50%, 60%, 70%, 80%, 90%, or 95% of the isolated strain.

[0051] A metagenomic sequence dataset, as used herein, refers to a collection of nucleic acid sequence data that is randomly sampled from and thereby is derived from a plurality of isolated microorganisms. The term metagenomics is derived from the statistical concept of meta-analysis (the process of statistically combining separate analyses) and genomics (the comprehensive analysis of an organism's genetic material).

[0052] Nucleic acid and polynucleotide: The terms “nucleic acid” and “polynucleotide” may be used interchangeably herein and refer to both RNA and DNA, including cDNA, genomic DNA, synthetic DNA, and DNA or RNA containing nucleic acid analogs. Polynucleotides can have any three-dimensional structure. A nucleic acid can be double-stranded or single-stranded (i.e., a sense strand or an antisense strand). Non-limiting examples of polynucleotides include genes, gene fragments, exons, introns, messenger RNA (mRNA), transfer RNA, ribosomal RNA, siRNA, micro-RNA, ribozymes, cDNA, DNA/RNA hybrids, recombinant polynucleotides, branched polynucleotides, nucleic acid probes and nucleic acid primers. A polynucleotide may contain unconventional or modified nucleotides.

[0053] Operably linked: As used herein, “operably linked” or “operably connected” is intended to mean a functional linkage between two or more sequences. For example, an operable linkage between a polynucleotide of interest and a regulatory sequence (e.g, a promoter) is functional link that allows for expression of the polynucleotide of interest. Operably linked elements may be contiguous or non-contiguous. In this sense, the term “operably linked” refers to the positioning of a regulatory region and a coding sequence to be transcribed in a nucleic acid molecule so that the regulatory region is effective for regulating transcription or translation of the coding sequence of interest. For example, to operably link a coding sequence and a regulatory region, the translation initiation site of the translational reading frame of the coding sequence is typically positioned between one and about fifty nucleotides downstream of the regulatory region. A regulatory region can, however, be positioned as much as about 5,000 nucleotides upstream of the translation initiation site, or about 2,000 nucleotides upstream of the transcription start site. When used to refer to the joining of two protein coding regions, by “operably linked” is intended that the coding regions are in the same translational reading frame. When used to refer to the effect of an enhancer, “operably linked” indicated that the enhancer increases the expression of a particular polypeptide or polynucleotides of interest. Where the polynucleotide or polynucleotides of interest encode a polypeptide, the encoded polypeptide is produced at an elevated level.

[0054] Percentage of sequence identity: “percentage of sequence identity” or “percent sequence identity”, as used herein in reference to a nucleic acid sequence or an amino acid sequence, refers to the percentage of identical nucleic acid bases or amino acid residues in a linear sequence of a reference (“query”) molecule as compared to a test (“subject”) molecule when the two sequences are optimally aligned. “Percentage of sequence identity” is determined by comparing two optimally locally aligned sequences over a comparison window defined by the length of the local alignment between the two sequences. The amino acid sequence or nucleic acid sequence in the comparison window may comprise additions or deletions (e.g., gaps or overhangs) as compared to the reference sequence (which does not comprise additions or deletions) for optimal alignment of the two sequences. Local alignment between two sequences only includes segments of each sequence that are deemed to be sufficiently similar according to a criterion that depends on the algorithm used to perform the alignment (e.g. BLAST). The percentage of sequence identity is calculated by determining the number of positions at which the identical nucleic acid base or amino acid residue occurs in both sequences to yield the number of matched positions, dividing the number of matched positions by the total number of positions in the window of comparison and multiplying the result by 100. Optimal alignment of sequences for comparison may be conducted by the local homology algorithm of Smith and Waterman (Add. APL. Math. 2:482, 1981), by the global homology alignment algorithm of Needleman and Wunsch (J. Mol. Biol. 48:443, 1970), by the search for similarity method of Pearson and Lipman (Proc. Natl. Acad. Sci. USA 85: 2444, 1988), by heuristic implementations of these algorithms (NCBI BLAST, WU-BLAST, BLAT, SIM, BLASTZ), or by visual inspection. For purposes of this invention, “percent identity” may also be determined using BLASTX version 2.0 for translated nucleotide sequences and BLASTN version 2.0 for polynucleotide sequences. Given that two sequences have been identified for comparison, GAP and BESTFIT are preferably employed to determine their optimal alignment. Typically, the default values of 5.00 for gap weight and 0.30 for gap weight length are used. The term “substantial sequence identity” between polynucleotide or polypeptide sequences refers to polynucleotide or polypeptide comprising a sequence that has at least 50% sequence identity, preferably at least 70%, preferably at least 80%, more preferably at least 85%, more preferably at least 90%, even more preferably at least 95%, and most preferably at least 96%, 97%, 98% or 99% sequence identity compared to a reference sequence using the programs. In addition, pairwise sequence homology or sequence similarity, as used herein refers to the percentage of residues that are similar between two sequences aligned. Families of amino acid residues having similar side chains have been well defined in the art. These families include amino acids with basic side chains (e.g., lysine, arginine, histidine), acidic side chains (e.g., aspartic acid, glutamic acid), uncharged polar side chains (e.g., glycine, asparagine, glutamine, serine, threonine, tyrosine, cysteine), nonpolar side chains (e.g., alanine, valine, leucine, isoleucine, proline, phenylalanine, methionine, tryptophan), beta-branched side chains (e.g., threonine, valine, isoleucine) and aromatic side chains (e.g., tyrosine, phenylalanine, tryptophan, histidine).

[0055] Query nucleic acid and amino acid sequences can be searched against subject nucleic acid or amino acid sequences residing in public or proprietary databases. Such searches can be done using the National Center for Biotechnology Information Basic Local Alignment Search Tool (NCBI BLAST v 2.18) program. The NCBI BLAST program is available on the interne from the National Center for Biotechnology Information (blast.ncbi.nlm.nih.gov/Blast.cgi). Typically the following parameters for NCBI BLAST can be used: Filter options set to “default”, the Comparison Matrix set to “BLOSUM62”, the Gap Costs set to “Existence: 11, Extension: 1”, the Word Size set to 3, the Expect (E threshold) set to 1e-3, and the minimum length of the local alignment set to 50% of the query sequence length. Sequence identity and similarity may also be determined using GenomeQuest™ software (Gene-IT, Worcester Mass. USA).

[0056] Pest: as used herein, the terms “pest” or grammatical equivalents thereof, are understood to refer to undesired organisms that may include, but not limited to, bacteria, fungi, plants (weeds), nematodes, insects, and other pathogenic animals that negatively affect plants and animals by colonizing, attacking, infesting, or infecting them. As such, the term “pesticidal”, as used herein, refers to the ability of a substance or composition to decrease the rate of growth of a pest, i.e., an undesired organism, or to increase the mortality of a pest. The growth rate of pest can be quantified by using any one of a variety of methods known in the art such as, for example, by quantifying the number of viable pests over time.

[0057] As used herein, the terms “acaridical”, “aphicidal”, “bactericidal”, “insecticidal”, microbicidal”, or nematicidal”, or grammatical equivalents thereof, are understood to refer to substances or compositions having pesticidal activity against organisms encompassed by the taxonomical classification of root term and also to refer to substances having pesticidal activity against organisms encompassed by colloquial uses of the root term, where those colloquial uses may not strictly follow taxonomical classifications. For example, the term “insecticidal” is understood to refer to substances having pesticidal activity against organisms generally known as insects of the phylum Arthropoda, class Insecta. Further as provided herein, the term is also understood to refer to substances having pesticidal activity against other organisms that are colloquially referred to as “insects” or “bugs” encompassed by the phylum Arthropoda, although the organisms may be classified in a taxonomic class different from the class Insecta. According to this understanding, the term “insecticidal” can be used to refer to substances having activity against arachnids (class Arachnida), in particular mites (subclass Acari/Acarina), in view of the colloquial use of the term “insect.” The term “acaridical” is understood to refer to substances having pesticidal activity against mites (Acari/Acarina) of the phylum Arthropoda, class Arachnida, subclass Acari/Acarina. The term “aphicidal” is understood to refer to substances having pesticidal activity against aphids (Aphididae) of the phylum Arthopoda, class Insecta, family Aphididae. It is understood that all these terms are encompassed by the term “pesticidal” or “pesticide” or grammatical equivalents. It is also understood that these terms are not necessarily mutually exclusive, such that substances known as “insecticides” can have pesticidal activity against organisms of any family of the class Insecta, including aphids, and organisms that are encompassed by other colloquial uses of the term “insect” or “bug” including arachnids and mites. It is understood that “insecticides” can also be known as acaricides if they have pesticidal activity against mites, or aphicides if they have pesticidal activity against aphids.

[0058] Promoter: As used herein, a “promoter” is a nucleotide sequence capable of initiating transcription in a cell, such as plant cell or microbial cell, and can drive or facilitate transcription of a nucleotide sequence or fragment thereof of the instant invention. Such promoters need not be of microbial origin or plant origin. For example, promoters derived from plant viruses, such as the CaMV35S promoter or from Agrobacterium tumefaciens, such as the T-DNA promoters, can be useful for the purposes of the present invention. Another non-limiting example is the tac promoter (see, e.g., U.S. Pat. No. 5,840,554) that can be particularly useful for expressing the molecules and sequences in accordance with the present invention in microbial host cells, such as Pseudomonas fluorescens cells.

[0059] Polypeptide (may also be used interchangeably with peptide, protein): the term “polypeptide”, as used herein, refers to a compound of two or more subunit amino acids, amino acid analogs, or other peptidomimetics, regardless of post-translational modification, e.g., phosphorylation or glycosylation. The subunits may be linked by peptide bonds or other bonds such as, for example, ester or ether bonds. Full-length polypeptides, truncated polypeptides, point mutants, insertion mutants, splice variants, chimeric proteins, and fragments thereof are encompassed by this definition.

[0060] Progeny: As used herein, “progeny” includes descendants of a particular plant or plant line. Progeny of an instant plant include seeds formed on F1, F2, F3, F4, F5, F6 and subsequent generation plants, or seeds formed on BC1, BC2, BC3, and subsequent generation plants, or seeds formed on F1BC1, F1 BC2, F1BC3, and subsequent generation plants. The designation F1 refers to the progeny of a cross between two parents that are genetically distinct. The designations F2, F3, F4, F5 and F6 refer to subsequent generations of self- or sib-pollinated progeny of an F1 plant.

[0061] Regulatory region: the term “regulatory region”, as used herein, refers to a nucleotide sequence that influences transcription or translation initiation and rate, and stability and/or mobility of a transcription or translation product in a given host organism. Such regulatory regions can be synthetic or derived from heterologous sources. For example, regulatory regions for use in plants need not be of plant origin. Regulatory sequences include but are not limited to promoter sequences, enhancer sequences, response elements, protein recognition sites, inducible elements, protein binding sequences, 5′ and 3′ untranslated regions (UTRs), transcriptional start sites, termination sequences, polyadenylation sequences, introns, and combinations thereof. A regulatory region typically comprises at least a core (basal) promoter. A regulatory region also may include at least one control element, such as an enhancer sequence, an upstream element or an upstream activation region (UAR). For example, a suitable enhancer is a cis-regulatory element (−212 to −154) from the upstream region of the octopine synthase (ocs) gene, which can be useful for driving expression of biotoxin transgenes in plant cells.

[0062] Transgenic organism: as used herein, a “transgenic organism” or “recombinant organism” refers to an organism which comprises within its genome a heterologous polynucleotide. Generally, the heterologous polynucleotide is stably integrated within the genome such that the polynucleotide is passed on to successive generations. The heterologous polynucleotide may be integrated into the genome alone or as part of a recombinant expression cassette. “Transgenic” is used herein to include any cell, cell line, callus, tissue, the genotype of which has been altered by the presence of heterologous nucleic acid. The term transgenic includes those transgenics initially so altered as well as those created by sexual crosses or asexual propagation from the initial transgenic. The term transgenic as used herein does not encompass the alteration of the genome (chromosomal or extra-chromosomal) by conventional plant breeding methods or by naturally occurring events such as random cross-fertilization, non-recombinant viral infection, non-recombinant bacterial transformation, non-recombinant transposition, or spontaneous mutations.

[0063] Variant: when referring to polypeptides and nucleic acids, the term “variant” is used herein to denote a polypeptide, protein or polynucleotide molecule with some differences, generated synthetically or naturally, in their base or amino acid sequences as compared to a reference polypeptide or polynucleotide, respectively. For example, these differences include substitutions, insertions, deletions or any desired combinations of such changes in a reference polypeptide or polynucleotide. Polypeptide and protein variants can further consist of changes in charge and/or post-translational modifications (such as glycosylation, methylation, phosphorylation, etc.) “Functional variants” of the regulatory polynucleotide sequences are also encompassed by the compositions of the present invention. Functional variants include, for example, the native regulatory polynucleotide sequences of the invention having one or more nucleotide substitutions, deletions or insertions and which can drive expression of an operably-linked polynucleotide sequence under conditions similar to those under which the native promoter is active. Functional variants of the invention may be created by site-directed mutagenesis, induced mutation, or may occur as allelic variants (polymorphisms). When the term “variant” is used in reference to a microorganism, it typically refers to a microbial strain having identifying characteristics of the species to which it belongs, while having at least one nucleotide sequence variation or identifiably different trait with respect to the parental strain, where the trait is genetically based (heritable).

[0064] Vector: the term “vector” refers to a nucleic acid construct designed for transfer between different host cells. As used herein, “vector” refers to a replicon, such as a plasmid, phage, or cosmid, into which another DNA segment may be inserted so as to bring about the replication of the inserted segment. Generally, a vector is capable of replication when associated with the proper control elements. As such, the term “vector” includes cloning vectors and expression vectors, as well as viral vectors and integrating vectors. In particular, an “expression vector” is a vector that includes a regulatory region, thereby capable of expressing DNA sequences and fragments in a host cell (in vivo) and/or in a cell-free environment (in vivo).

[0065] All publications and patent applications mentioned in this specification are herein incorporated by reference to the same extent as if each individual publication or patent application was specifically and individually indicated to be incorporated by reference.

[0066] No admission is made that any reference constitutes prior art. The discussion of the references states what their authors assert, and the applicants reserve the right to challenge the accuracy and pertinence of the cited documents. It will be clearly understood that although a number of prior art publications are referred to herein, this reference does not constitute an admission that any of these documents forms part of the common general knowledge in the art.

[0067] The discussion of the general methods given herein is intended for illustrative purposes only. Other alternative methods and embodiments will be apparent to those of skill in the art upon review of this disclosure.

### Extrachromosomal Genetic Content and Biotoxins

[0068] Much of the diversity present in bacterial populations is present on extrachromosomal DNA content, including plasmids and episomes. Strain variation due to plasmid content is well known for Bacillus strains, particularly Bacillus thuringiensis (“Bt”). Insecticidal proteins, such as the Bacillus thuringiensis delta-endotoxin genes which are found predominately on large extrachromosomal DNA molecules, can be rapidly discovered by using the method(s) of the present invention. Furthermore, many Clostridia strains are also known to have large extrachromosomal plasmids, and some of these are known to contain virulence factors, as well as toxins such as iota toxin (see, e.g., Perelle et al., Infect. Immun., 61:5147-5156, 1993; and the references cited therein). In addition, it has been shown that the majority of variability for Clostridia strains appears to occur due to plasmid content (see, e.g., Katayam et al., Mol. Gen. Genet. 250:17-28, 1996). Thus, decoding of the extrachromosomal DNA content of multiple Clostridia strains will quickly capture a large amount of genetic diversity. In addition, there has been report of a homolog of delta-endotoxin gene present in Clostridia sp. (Barloy et al., J. Bacterial. 178:3099-3105, 1996).

[0069] Many microbial plasmids are also known to contain virulence factors, important for infectivity or severity of infection by bacterial pathogens. Accordingly, it is likely that many of the proteins expressed by plasmid genomes are likely to have value as vaccines. For example, both plasmids pXO1 and pXO2 of Bacillus anthracis have been reported to encode proteins required for pathogenesis during anthrax infection. pXO2 encodes proteins that produce a protective capsule around the bacterium. The pXO1 plasmid encodes the three proteins of the anthrax toxin complex, lethal factor (LF), edema factor (EF), and the protective antigen (PA). The PA protein (protective antigen) forms the basis of a vaccine for anthrax. The quick and efficient decoding of bacterial plasmids will yield information with which one can create a database of proteins that might serve as effective vaccines.

[0070] Tumor-inducing and symbiotic plasmids are common in Agrobacterium and Rhizobium strains (Van Larebeke et al., Nature, 252:169-170, 1974). Thus decoding of bacterial plasmids, especially those from known plant pathogens, is likely to identify genes involved in plant-pathogen interactions including genes involved in or required for both virulence and avirulence.

[0071] In a non-limiting exemplification, insecticidal proteins such as the Bacillus thuringiensis delta-endotoxin genes are often found on large extrachromosomal DNA molecules. Thus isolation and sequencing of extrachromosomal DNA from Bacillus strains, such as Bacillus thuringiensis strains is likely to lead to identification of novel delta-endotoxin genes. Such toxin genes are potentially valuable for the control of insect pests.

[0072] Bacillus thuringiensis is a Gram-positive spore forming soil bacterium characterized by its ability to produce crystalline inclusions that are specifically toxic to certain orders and species of insects, but are harmless to plants and many other non-targeted organisms. Conventional submerged fermentation techniques can be used to produce Bt spores on a large scale makes Bt bacteria commercially attractive as a source of insecticidal compositions. Compositions including Bacillus thuringiensis strains or their insecticidal proteins are widely used as environmentally-acceptable insecticides to control agricultural insect pests or insect vectors for a variety of human or animal diseases.

[0073] Crystal (Cry) proteins (delta-endotoxins) from Bacillus thuringiensis have potent insecticidal activity against predominantly Lepidopteran, Dipteran, and Coleopteran larvae. These proteins also have been reported to show pesticidal activity against Hymenoptera, Homoptera, Phthiraptera, Mallophaga, and Acari pest orders, as well as other invertebrate orders such as Nemathelminthes, Platyhelminthes, and Sarcomastigorphora. There are currently over 600 known species of crystal proteins with a wide range of specificities and toxicities. These crystal proteins and corresponding genes were originally classified primarily based on their structure and insecticidal spectrum (see, e.g., Feitelson, In Advanced Engineered Pesticides, Ed. Kim, L., Marcel Dekker, Inc., New York, N.Y., pp. 63-71, 1993). The major classes were Lepidoptera-specific (I), Lepidoptera- and Diptera-specific (II), Coleoptera-specific (III), Diptera-specific (IV), and nematode-specific (V) and (VI). The proteins were further classified into subfamilies; more highly related proteins within each family were assigned divisional letters such as Cry1A, Cry1B, Cry1C, etc. Even more closely related proteins within each division were given names such as Cry1C1, Cry1C2.

[0074] A more recent nomenclature was described for the Cry genes based upon amino acid sequence identity rather than insect target specificity (Crickmore et al., Microbiol. and Mol. Bio. Reviews, 62:807-813, 1998). In this classification, each toxin is assigned a unique name incorporating a primary rank (an Arabic number), a secondary rank (an uppercase letter), a tertiary rank (a lowercase letter), and a quaternary rank (another Arabic number). In the new classification, Roman numerals have been exchanged for Arabic numerals in the primary rank. Proteins with less than 45% sequence identity have different primary ranks, and the criteria for secondary and tertiary ranks are 78% and 95%, respectively.

[0075] The crystal protein typically does not exhibit insecticidal activity until it has been ingested and solubilized in the insect midgut. The ingested protoxin is hydrolyzed by proteases in the insect digestive tract to an active toxic molecule. This toxin binds to apical brush border receptors in the midgut of the target larvae and inserts into the apical membrane creating ion channels or pores, resulting in larval death.

[0076] Delta-endotoxins generally have five conserved sequence domains, and three conserved structural domains (see, for example, de Maagd et al., Trends Genetics 17:193-199, 2001). The first conserved structural domain consists of seven alpha helices and is involved in membrane insertion and pore formation. Domain II consists of three beta-sheets arranged in a Greek key configuration, and domain III consists of two antiparallel beta-sheets in “jelly-roll” formation (de Maagd et al., 2001, supra). Domains II and III are involved in receptor recognition and binding, and are therefore considered determinants of toxin specificity.

[0077] Aside from delta-endotoxins, there are several other known classes of insecticidal and pesticidal protein toxins. Other kinds of insecticidal proteins have been described in B. thuringiensis and Bacillus cereus, among which are the vegetative insecticidal proteins or Vip proteins. The Vip proteins are secreted during vegetative growth and do not exhibit any similarity with the Cry or Cyt toxins. Currently, all Vip-related sequences that have been described fall into three different families, Vip1, Vip2, and Vip3. A classification of these proteins into three classes, seven subclasses, and further subdivisions was recently proposed by the Bacillus thuringiensis nomenclature committee (Crickmore et al., 2005, at www.lifesci.sussex.ac.uk/Home/Neil_Crickmore/Bt/). Vip3 proteins have a different host range, which includes several major lepidopteran pests. Like Cry toxins, Vip3A proteins must be activated by proteases prior to recognition at the surface of the midgut epithelium of specific 80-kDa and 100-kDa membrane proteins different from those recognized by Cry toxins. Apoptosis was initially suggested as a mode of action, but it was recently shown that like Cry toxins, activated Vip3A toxins are pore-forming proteins capable of making stable ion channels in the membrane. The Vip1 and Vip2 proteins are the two components of a binary toxin that exhibits toxicity to coleopterans. Vip1Aa1 and Vip2Aa1 are generally very active against corn rootworms, particularly Diabrotica virgifera virgifera and Diabrotica longicornis. The VIP1NIP2 toxins, together with other binary (“A/B”) toxins. A/B toxins such as VIP, C2, CDT, CST, or the B. anthracis edema and lethal toxins exhibit strong activity on insects by a mechanism believed to involve receptor-mediated endocytosis followed by cellular toxification.

### Description of the Screening Method

[0078] The present disclosure provides an integrated approach to rapidly and efficiently identify and isolate useful genes. One aspect of the present invention provides a method to rapid and highly efficient identification of gene sequences encoding biotoxin in microorganisms. Particularly, the method allows for a rapid and efficient sampling and screening of extrachromosomal genetic content of microorganisms for novel sequences of interest. The method involves rapid sequencing and characterization of mixed populations of extrachromosomal DNA molecules derived from a collection of microbial isolates. The method targets extrachromosomal DNA and avoids repeated cloning and sequencing the host chromosomes, thus allowing one to focus on genes that are encoded by extrachromosomal DNA, e.g. biotoxins. The method involves establishing a metagenomic dataset comprising nucleotide sequences deriving from the mixed population of extrachromosomal DNA molecules, processing and comparing the annotated sequences of the metagenomic dataset against known sequences to identify novel nucleotide sequences. In some preferred aspects of the present invention, the processed DNA sequences can be translated in all six frames and the resulting amino acid sequences can be compared against known protein sequences. Microorganisms of particular interest include, but not limited to bacteria, fungi, algae, and the like.

[0079] The integrated screening methods described herein can be used to rapidly identify and clone novel genes that have homology to existing genes. Particularly, the screening methods above can be useful for the identification of novel genes that have little homology with known genes, which would be difficult to identify by other methods, such as hybridization.

[0080] The workflow of a typical screen begins with the generation of a collection of isolated microbes and proceeds with isolation of extrachromosomal DNA, high throughput sequencing, sequence read processing and assembly. During process of sequence data mining and analysis, genes are called on sequence reads, or sequence contigs, or both. Community composition analysis (i.e. metagenomic data analysis) is employed at several stages of this workflow, and databases are typically needed to facilitate the analysis. All of the steps of this workflow will be described in detail below and throughout the present disclosure.

[0081] Environmental samples, including soil, plant tissues, insects and water samples may be collected from diverse ecosystems that harbor native plants with phylogenetic similarity to target crops. Culture-based isolations of plant-associated microbes may be conducted in a multi-phase approach by targeting populations residing in the soil, rhizosphere and phyllosphere. Individual samples may be processed separately or, alternatively, multiple samples from a geographically unique sampling location were pooled together prior further processing, which can be particularly useful in capturing the microbial diversity within an entire region using a single isolation event. Microbial cell extraction methods can be performed on samples, followed by serial dilution and plating onto a highly selective chromogenic medium developed to isolate Bacillus thuringiensis (Bt). Bt isolates can be colony-picked, archived, and grown individually in small-volume cultures in preparation for subsequent extractions of extrachromosomal DNA. Populations of non-Bt microbes can be targeted in a similar manner by plating environmental samples onto various enrichment and isolation media or by selecting specific strains, based on their phylogeny, from existing archives to create composite cultures that may typically be composed of several hundred individual isolate cultures. Large construct plasmid extraction kits (QIAGEN, Inc.) can then be used to isolate extrachromosomal DNA from the composite cultures. In some embodiments of the present invention, modifications may be made to the QIAGEN® recommended workflow to make the lysis procedure more rigorous for lysing Gram-positive cells. The resulting purified extrachromosomal DNA, with minimal genomic contamination, can then be quantified and prepared for next-generation high throughput sequencing.

[0082] Since extractions of extrachromosomal DNA can typically be performed on composite cultures, the resulting purified DNA samples are mixed populations of extrachromosomal DNA that are typically derived from hundreds of individual isolates.

[0083] After isolation, the pool of extrachromosomal nucleic acids can be subjected to a high-throughput sequencing process to generate metagenomic datasets. Processing step of metagenomic sequence data, which includes assembly, gene prediction and annotation, can be used to identify genes having potential activity of interest. As described in detail below, several toxin genes have been identified by using the method of the present invention, that belong to many major classes of Bt toxins including Cry, VIP and Cyt genes. As reported in Table 1 and set forth in the Sequence Listing, several full-length and partial novel biotoxin-encoding genes were discovered along with many genes already previously discovered.

### Establishing a Metagenomic Sequence Dataset

[0084] Metagenomics is currently one of the fastest-developing research areas. The term is derived from the statistical concept of meta-analysis (the process of statistically combining separate analyses) and genomics (the comprehensive analysis of an organism's genetic material). To date, conventional metagenomics is often defined as the application of high-throughput sequencing to DNA obtained directly from environmental samples or series of related samples. To some extent, conventional metagenomics is a derivation of microbial genomics, with the key difference being that it bypasses the requirement for obtaining pure cultures for sequencing. In addition, the samples are obtained from communities rather than isolated populations. In principle, the metagenomic analysis of environmental microbial communities can be divided into two main approaches: function-based and sequence-based screening of metagenomic libraries. Both screening techniques include the isolation of environmental DNA and the construction of small-insert or large-insert libraries (see, e.g. Simon and Daniel, Appl. Environ. Microbiol. 77:1153-1161, 2011).

[0085] Although metagenomics has been used successfully to identify enzymes with desired activities, it has relied primarily on relatively low-throughput function-based screening or sequence-based screening of environmental DNA clones libraries. Sequence-based metagenomic discovery of complete genes from environmental samples has been limited by microbial species complexity of most environments and the consequent rarity of full-length genes in low-coverage metagenomic assemblies. The integrated screening method according to one aspect of the present invention provides a solution to this long felt need by providing a method to rapidly and efficiently capture the genetic diversity from microorganism genomes and identify novel sequences of commercial interest, without the need for labor-intensive construction of clone libraries, or sequencing the entire genome of the microorganisms.

[0086] Some embodiments of the present invention involve establishing a metagenomic sequence dataset. As discussed above, conventional metagenomics is often defined as the application of high-throughput sequencing to DNA obtained directly from environmental samples or series of related samples by bypassing the requirement for obtaining pure cultures for sequencing. For the purpose of this application, the term “metagenomic sequence data” refers to randomly sampled DNA sequence data that is derived from a plurality of isolated microbes. Sequence data from metagenomic sequence datasets are often assembled into larger contigs. In general, the term “contig” (from “contiguous”) refers to a set of overlapping nucleic acid sequences that together represent a consensus region of a nucleic acid molecule. In a typical genome sequencing projects, a contig refers to overlapping sequence data (reads), resulting from the reassembly of the small DNA fragments generated by bottom-up sequencing strategies, which involves shearing genomic DNA into many small fragments (“bottom”), sequencing these fragments, reassembling them back into contigs and eventually the entire genome (“up”). As such, the term “contig” as used herein refers to contiguous extrachromosomal DNA stretches comprising a plurality of overlapping reads. A metagenomic dataset typically comprises at least 10 Mbp, at least 20 Mbp, preferably at least 30 Mbp, more preferably at least 40 Mpb, and most preferably at least 50 Mbp of short sequence reads data, that can subsequently be used for in silico sequence mining for genes and sequences of commercial interest, such as biotoxin-encoding genes.

### Sequencing Technologies Suitable for Practicing the Method of the Invention

[0087] The sequence of extrachromosomal nucleic acid molecules may be determined by using a variety of techniques, particularly the next-generation high-throughput sequencing technologies, which are sometimes referred to as massively parallel sequencing techniques. These high-throughput sequencing techniques are well known and described in the technical and scientific literature, for example, in a review by Lin et al. (Recent patents on Biomedical Engineering, 1:60-67, 2008) and the references cited therein.

[0088] In some embodiments, sequencing may be performed directly on the extrachromosomal nucleic acid molecules by using direct sequencing procedures that do not require molecular cloning. Although the cloning of the nucleic acid molecules is relatively straightforward, direct sequencing of nucleic acids typically eliminates the need in subcloning and production of many shotgun libraries, minimizes the number of sequencing reactions, and dramatically accelerates the acquisition of sequence information and the assembly of complete sequences. The advantages of direct nucleic acid sequencing include elimination of cloning artifacts and cross-contamination of libraries or PCR reactions. This is extremely important for production sequencing of closely related organisms, as it provides non-biased complete coverage of the genomes with low number of redundant sequencing reactions and results in significant savings on data processing. Common techniques for direct sequencing of nucleic acids are known in the art. See, e.g., Lin et al. (2008, supra); Lilian et al., (Quarterly Rev. Biophysics, 169-200, 2002).

[0089] Sequencing of the extrachromosomal nucleic acid molecules may also be performed by one of several conventional sequencing methods including, but not limited to, conventional gel-based technologies as well as those that encompass sequencing by synthesis (SBS), sequencing by ligation, sequencing by hybridization, and many more recent sequencing technologies using nano-transistor array, scanning tunneling microscopy and nanowire molecule sensors, etc.

[0090] Common gel-based technologies are essential derived from the methodology developed by Sanger et al. in 1970's (Sanger et al., 1977), which involves sequencing by chain termination and gel separation. In such method, a mixed population of nucleic acid fragments representing terminations at each base was generated using ‘terminator’—the 2′,3′-dideoxy and arabinonucleoside analogues of the normal deoxynucleoside triphosphates. They are run on an electrophoretic gel and the sequence can be ‘read’ from the order of fragments in the gel. A similar sequencing method that relies on chemical degradation of nucleic acid fragments at each base was also developed by Maxam and Gilbert (Proc. Natl. Acad. Sci. USA, 1977).

[0091] Sequencing by synthesis using fluorophore-labeled, reversible-terminator nucleotides is the most common platform of sequencing by synthesis. It is sometimes named “fluorescent in situ sequencing” (FISSEQ). It usually involves these following steps: attaching the DNA to be sequenced in a solid surface, then adding polymerase and labeled nucleotides with cleavable chemical group to cap an-OH group at a 3′-position of the deoxyribose so that incorporation of the nucleotides terminates the reaction. The sequence can be read from the labels used for nucleotides. The Pyrosequencing technology is another SBS technology developed by Ronaghi et al. (Ronaghi et al., Anal. Biochem. 242, 1: 84-9, 1996; Ronaghi, Genome Res. 11:3-11, 2001). In brief, it is based on the detection of pyrophosphate (PPi) released during DNA synthesis when inorganic PPi is released after nucleotide incorporation by DNA polymerase. The released PPi is then converted to ATP by ATP sulfurylase. A luciferase reporter enzyme uses the ATP to generate light, which is then detected by a charge coupled device (CCD) camera. The light signal is proportional to the number of nucleotides incorporated (e.g. A, TT, CCC etc) and because the G, A, T, and C nucleotides are added stepwise in a sequencing cycle, the DNA sequences are easily derived. Pyrosequencing has evolved into an ultra-high throughput sequencing technology with the combination of several technologies such as template carrying microbeads deposited in microfabricated picoliter-sized reaction wells connecting to optical fibers. Several commercial sequencing platforms based on the pyrosequencing technology are currently available, such as Genome Sequencer 20 System and the Genome Sequencer FLX System from 454 Life Science/Roche Diagnostics, and the “Fluorescent Resonance Energy Transfer (FRET)” technology commercialized by Visigen Biotechnolgies Inc (see, e.g., U.S. Pat. Appln. Nos. US20070172869, US20070172860, and US200701728190. Other SBS-based technologies including, but not limited to, those marketed by Intelligent Bio-Systems Inc. (see, e.g., European Pat. Appln. No. EP1790736), Affymetrix Inc. (see, e.g., U.S. Pat. Appln. No. US20070105131) may also be useful. In some embodiments of the invention, the Genome Analyzer™ system (e.g., U.S. Pat. Appln. No. US20077232656), which is also based on an SBS technology, from Illumina Inc. is particularly preferred.

[0092] One skilled in the art will recognize that it is advantageous and often necessary to generate sequence data from both ends (as known as pair-end, dual-end or double ended sequencing) of a template DNA fragment to confirm or help shotgun sequence assemblies. Pair-end sequencing will also be useful for characterization of genomic rearrangement and insertion and deletion, such as in cancer genome characterization. A variety of “double-end sequencing” technologies are well known, such as those described in U.S. Pat. Appln. Nos. US20077244567, US20060024681, US20070172839, US20060292611, US20077270951, and US20077282337, and may be used for the method of the present invention.

[0093] In certain embodiments, other high-throughput sequencing methods based on polony amplification and FISSEQ may be used. In brief, polony amplification is a method to amplify DNAs in situ on a thin polyacrylamide film. The DNA movement is limited in the polyacrylamide gel, so the amplified DNAs are localized in the gel and form the so-called “polonies”, polymerase colonies. Up to 5 million polonies (i.e. 5 million PCRs) can form on a single glass microscope slide. Variants of the polony sequencing method, which include polonyfluorescent-in situ-sequencing beads and PMAGE (for “polony multiplex analysis of gene expression”, which combines polony amplification and a sequence-by-ligation method), may also be used for the method of the invention.

[0094] Other high-throughput sequencing technologies, devices and systems that may also be used to practice the present invention include those that encompass nanopore sequencing (see, e.g., U.S. Pat. Appln. Nos. US20070190542, US20070042366, US20070048745, US20060231419, and US20070178507), and sequencing by hybridization (SBH) (see, e.g., U.S. Pat. Appln. No. US20070178516, US20077276338, and US20060287833).

[0095] A variety of high-throughput sequencing by ligation technologies may also be used for the method of the present invention. Examples of such technologies include, but not limited to, the “Massively Parallel Signature Sequencing” technology (see, e.g. Brenner et al., Proc. Natl. Acad. Sci. USA, 2000; U.S. Pat. Appln. No. US20006013445). In some versions of this technology, DNA molecules are amplified in parallel onto microbeads by emulsion polymerase chain reaction. Millions of beads are then immobilized in a polyacrylamide gel and sequenced using sequencing by ligation method. Devices and systems commercialized by Applied Biosystems/Life Inc. such as SOLiD (Supported Oligo Ligation Detection) may be particularly useful. A more recent version, which is based on a similar sequence-by-ligation method in combination with emulsion PCR, may also be used.

[0096] One skilled in the art will recognize that it is advantageous and often necessary to deploy combinations of different sequencing technologies for producing better-quality assembly and annotation of microbial metagenomic sequence data.

### Methods for Taxonomic Identification

[0097] Once a microorganism has been selected by the screening methods disclosed by the present invention, it is often beneficial to identify them taxonomically. One of skill in the art will appreciate that the taxonomic classification of microorganism isolates can be determined by a variety of techniques, including but not limited to (1) hybridization of a nucleic acid probe to a nucleic acid molecule of said microbial isolates; (2) amplification of a nucleic acid molecule of said microbial isolates; (3) immuno-detection of a molecule of said microbial isolates; (4) sequencing of a nucleic acid molecule derived from said microbial isolates; or a combination of two or more of these techniques.

[0098] Organism identification can therefore involve up to several different levels of analysis, and each analysis can be based on a different characteristic of the organism. Such analyses can include nucleic acid-based analysis (e.g., analysis of individual specific genes, either as to their presence or their exact sequence, or expression of a particular gene or a family of genes), protein-based analysis (e.g., at a functional level using direct or indirect enzyme assays, or at a structural level using immuno-detection techniques), and so forth.

[0099] Prior to carrying out intensive molecular analysis of isolated cultures, it may be useful to confirm that the microbial culture arose from a single cell, and is therefore a pure culture (except where, as discussed elsewhere in this disclosure, microorganisms are intentionally mixed). Microorganisms can often be distinguished based on direct microscopic analysis (do all of the cells in a sample look the same on examination), staining characteristics, simple molecular analysis (such as a simply restriction fragment length polymorphism (RFLP) determination), and so forth. In certain embodiments of the invention, however, it is not absolutely necessary to perform this purity confirmation step, as mixed microbial cultures will be apparent in subsequent analysis.

[0100] a. Nucleic Acid-Based Analysis:

[0101] In certain embodiments of the invention, methods provided for identifying microorganisms include amplifying and sequencing genes from very small numbers of cells. The provided procedures therefore overcome the problems of concentrating cells and their DNA from dilute suspensions. The provided procedures can be used to identify cells by gene sequence or to identify cells that have particular genes or gene families.

[0102] The term “nucleic acid amplification” generally refers to techniques that increase the number of copies of a nucleic acid molecule in a sample or specimen. Techniques useful for nucleic acid amplification are well known in the art. An example of nucleic acid amplification is the polymerase chain reaction (PCR), in which a biological sample collected from a subject is contacted with a pair of oligonucleotide primers, under conditions that allow for the hybridization of the primers to nucleic acid template in the sample. The primers are extended under suitable conditions, dissociated from the template, and then re-annealed, extended, and dissociated to amplify the number of copies of the nucleic acid. Other examples of in vitro amplification techniques include strand displacement amplification; transcription-free isothermal amplification; repair chain reaction amplification; ligase chain reaction; gap filling ligase chain reaction amplification; coupled ligase detection and PCR; and RNA transcription-free amplification.

[0103] In addition to the illustrative example primers provided herein, primers have also been designed, and new ones are continually being designed, for individual species or phylogenetic groups of microorganisms. Such narrowly targeted primers can be used with the methods described herein to screen and/or identify specifically only the microorganisms of interest.

[0104] Methods for preparing and using nucleic acid primers are described, for example, in Sambrook et al. (In Molecular Cloning: A Laboratory Manual, CSHL, New York, 1989), Ausubel et al. (ed.) (In Current Protocols in Molecular Biology, John Wiley & Sons, New York, 1998). Amplification primer pairs can be derived from a known sequence, for example, by using computer programs intended for that purpose such as Primer (Whitehead Institute for Biomedical Research, Cambridge, Mass.). One of ordinary skill in the art will appreciate that the specificity of a particular probe or primer increases with its length. Thus, for example, a primer comprising 30 consecutive nucleotides of an rRNA-encoding nucleotide or flanking region thereof will anneal to a target sequence with a higher specificity than a corresponding primer of only 15 nucleotides. Thus, in order to obtain greater specificity, probes and primers can be selected that comprise at least 20, 25, 30, 35, 40, 45, 50 or more consecutive nucleotides of a target nucleotide sequence such as the 16S rRNA.

[0105] Common techniques for the preparation of nucleic acids useful for nucleic acid applications (e.g., PCR) include phenol/chloroform extraction or use of one of the many DNA extraction kits that are available on the market. Another way that DNA can be amplified is by adding cells directly to the nucleic acid amplification reaction mix and relying on the denaturation step of the amplification to lyse the cells and release the DNA.

[0106] The product of nucleic acid amplification reactions may be further characterized by one or more of the standard techniques that are well known in the art, including electrophoresis, restriction endonuclease cleavage patterns, oligonucleotide hybridization or ligation, and/or nucleic acid sequencing. When in hybridization techniques are used for cell identification purposes, a variety of probe labeling methods can be useful, including fluorescent labeling, radioactive labeling and non-radioactive labeling.

[0107] b. Protein-Based Analysis:

[0108] In addition to analysis of nucleic acids, microorganisms selected using the methods of the present invention can be characterized and identified based on the presence (or absence) of specific proteins directly. Such analysis can be based on the activity of the specified protein, e.g., through an enzyme assay or by the response of a co-cultured organisms, or by the mere presence of the specified protein (which can for instance be determined using immunologic methods, such as in situ immunofluorescent antibody staining).

[0109] Enzyme assays: By way of example, fluorescent or chromogenic substrate analogs can be included into the growth media (e.g., microtiter plate cultures), followed by incubation and screening for reaction products, thereby identifying cultures on a basis of their enzymatic activities.

[0110] Co-cultivation response: In some embodiments of the present invention, the activity of an enzyme carried by a microbial isolate can be assayed based on the response (or degree of response) of a co-cultured organism (such as a reporter organism).

[0111] A variety of methods can also be used for identifying microorganisms selected and isolated from a source environment by binding at least one antibody or antibody-derived molecule to a molecule, or more particularly an epitope of a molecule, of the microorganism.

[0112] Anti-microorganism protein antibodies may be produced using standard procedures described in a number of texts, including Harlow and Lane (Antibodies, A Laboratory Manual, CSHL, New York, 1988). The determination that a particular agent binds substantially only to a protein of the desired microorganism may readily be made by using or adapting routine procedures. One suitable in vitro assay makes use of the Western blotting procedure (described in many standard texts, including Harlow and Lane; Antibodies, A Laboratory Manual, CSHL, New York, 1988).

[0113] Shorter fragments of antibodies (antibody-derived molecules, for instance, FAbs, Fvs, and single-chain Fvs (SCFvs)) can also serve as specific binding agents. Methods of making these fragments are routine.

[0114] Detection of antibodies that bind to cells on an array of this invention can be carried out using standard techniques, for instance ELISA assays that provide a detectable signal, for instance a fluorescent or luminescent signal.

### The Polynucleotides and Polypeptides of the Invention

[0115] In another aspect of the present invention, the disclosure provides novel isolated nucleic acid molecules, nucleic acid molecules that interfere with these nucleic acid molecules, nucleic acid molecules that hybridize to these nucleic acid molecules, and isolated nucleic acid molecules that encode the same protein due to the degeneracy of the DNA code. Additional embodiments of the present application further include the polypeptides encoded by the isolated nucleic acid molecules of the present invention.

[0116] The polynucleotides and polypeptides of the present invention will preferably be “biologically active” with respect to either a structural attribute, such as the capacity of a nucleic acid to hybridize to another nucleic acid molecule, or the ability of a polypeptide to be bound by antibody (or to compete with another molecule for such binding). Alternatively, such an attribute may be catalytic and thus involve the capacity of the molecule to mediate a chemical reaction or response.

[0117] The polynucleotides and polypeptides of the present invention may also be recombinant. As used herein, the term recombinant means any molecule (e.g. DNA, peptide etc.), that is, or results, however indirect, from human manipulation of a polynucleotide or polypeptide.

[0118] Nucleic acid molecules or fragment thereof of the present invention are capable of specifically hybridizing to other nucleic acid molecules under certain circumstances. As used herein, two nucleic acid molecules are said to be capable of specifically hybridizing to one another if the two molecules are capable of forming an anti-parallel, double-stranded nucleic acid structure. A nucleic acid molecule is said to be the “complement” of another nucleic acid molecule if they exhibit complete complementarity. As used herein, molecules are said to exhibit “complete complementarity” when every nucleotide of one of the molecules is complementary to a nucleotide of the other. Two molecules are said to be “minimally complementary” if they can hybridize to one another with sufficient stability to permit them to remain annealed to one another under at least conventional “low-stringency” conditions. Similarly, the molecules are said to be “complementary” if they can hybridize to one another with sufficient stability to permit them to remain annealed to one another under conventional “high-stringency” conditions. Conventional stringency conditions are described by Sambrook et al., In: Molecular Cloning, A Laboratory Manual, 2nd Edition, Cold Spring Harbor Press, Cold Spring Harbor, N.Y. (1989), and by Haymes et al. In: Nucleic Acid Hybridization, A Practical Approach, IRL Press, Washington, D.C. (1985). Departures from complete complementarity are therefore permissible, as long as such departures do not completely preclude the capacity of the molecules to form a double-stranded structure. Thus, in order for a nucleic acid molecule or fragment of the present invention to serve as a primer or probe it need only be sufficiently complementary in sequence to be able to form a stable.

[0119] Appropriate stringency conditions which promote DNA hybridization are, for example, 6.0× sodium chloride/sodium citrate (SSC) at about 45° C., followed by a wash of 2.0×SSC at 50° C. The conditions are known to those skilled in the art, or can be found in Current Protocols in Molecular Biology, John Wiley & Sons, N.Y. 6.3.1-6.3.6 (1989). For example, the salt concentration in the wash step can be selected from a low stringency of about 2.0×SSC at 50° C. to a high stringency of about 0.2×SSC at 50° C. In addition, the temperature in the wash step can be increased from low stringency conditions at room temperature at about 22° C., to high stringency conditions at about 65° C. Both temperature and salt may be varied, or either the temperature or the salt concentration may be held constant while the other variable is changed.

[0120] In a preferred embodiment, a nucleic acid of the present invention will specifically hybridize to one or more of the nucleic acid sequences set forth in the Sequence Listing or complements thereof under moderately stringent conditions, for example, at about 2.0×SSC and about 65° C.

[0121] In a particularly preferred embodiment, a nucleic acid of the present invention will include those nucleic acid molecules that specifically hybridize to one or more of the nucleic acid sequences set forth in the Sequence Listing or complements thereof under high stringency conditions.

[0122] In another embodiment, the present invention provides nucleotide sequences comprising regions that encode polypeptides. The encoded polypeptides may be the complete protein encoded by the gene represented by the polynucleotide, or may be fragments of the encoded protein. Preferably, polynucleotides provided herein encode polypeptides constituting a substantial portion of the complete protein, and more preferentially, constituting a sufficient portion of the complete protein to provide the relevant biological activity. Of particular interest are polynucleotides of the present invention that encode polypeptides involved in the production of biotoxins.

[0123] A subset of the nucleic acid molecules of this invention includes fragments of the disclosed polynucleotides consisting of oligonucleotides of at least 15, preferably at least 16 or 17, more preferably at least 18 or 19, and even more preferably at least 20 or more, consecutive nucleotides. Such oligonucleotides are fragments of the larger molecules having a sequence selected from the polynucleotide sequences in the Sequence Listing, and find use, for example, as interfering molecules, probes and primers for detection of the polynucleotides of the present invention.

[0124] In some embodiments, nucleic acid molecules that are fragments of these toxin-encoding nucleotide sequences are also encompassed by the present invention. A “toxin fragment” is intended to be a portion of the nucleotide sequence encoding a toxin protein. A fragment of a nucleotide sequence may encode a biologically active portion of a toxin protein, or it may be a fragment that can be used as a hybridization probe or PCR primer using methods disclosed below. Nucleic acid molecules that are fragments of a toxin nucleotide sequence comprise at least about 50, 100, 200, 300, 400, 500, 600, 700, 800, 900, 1000, 1050, 1100, 1150, 1200, 1250, 1300, 1350, 1400, 1450, 1500, 1550, 1600, 1650, 1700, 1750, 1800, 1850, 1900, 1950, 2000, 2050, 2100, 2150, 2200, 2250, 2300, 2350, 2400, 2450, 2500, 2550, 2600, 2650, 2700, 2750, 2800, 2850, 2900, 2950, 3000, 3050, 3100, 3150, 3200, 3250, 3300, 3350 contiguous nucleotides, or up to the number of nucleotides present in a full-length toxin encoding nucleotide sequence disclosed herein depending upon the intended use. The term “contiguous nucleotides” is intended to mean nucleotide residues that are immediately adjacent to one another. Fragments of the nucleotide sequences of the present invention will encode protein fragments that retain the biological activity of the toxin protein and, hence, retain pesticidal activity. By “retains activity” is intended that the fragment will have at least about 30%, at least about 50%, at least about 70%, 80%, 90%, 95% or higher of the pesticidal activity of the toxin protein. Methods for measuring pesticidal activity are well known in the art. See, for example, Czapla and Lang (J. Econ. Entomol. 83:2480-2485, 1990); Andrews et al. (Biochem. J. 252:199-206, 1988); Marrone et al. (J. of Economic Entomology 78:290-293, 1985); and U.S. Pat. No. 5,743,477).

[0125] A fragment of a toxin-encoding nucleotide sequence that encodes a biologically active portion of a protein of the invention will encode at least about 15, 25, 30, 50, 75, 100, 125, 150, 175, 200, 250, 300, 350, 400, 450, 500, 550, 600, 650, 700, 750, 800, 850, 900, 950, 1000, 1050, 1100 contiguous amino acids, or up to the total number of amino acids present in a full-length toxin protein of the invention. In some embodiments, the fragment is a proteolytic cleavage fragment. For example, the proteolytic cleavage fragment may have an N-terminal or a C-terminal truncation of at least about 100 amino acids, about 120, about 130, about 140, about 150, or about 160 amino acids relative to any amino acid sequences set forth in the Sequence Listing. In some embodiments, the fragments encompassed herein result from the removal of the C-terminal crystallization domain, e.g., by proteolysis or by insertion of a stop codon in the coding sequence.

[0126] Also of interest in the present invention are variants of the polynucleotides provided herein. Such variants may be naturally occurring, including homologous polynucleotides from the same or a different species, or may be non-natural variants, for example polynucleotides synthesized using chemical synthesis methods, or generated using recombinant DNA techniques. With respect to nucleotide sequences, degeneracy of the genetic code provides the possibility to substitute at least one base of the protein encoding sequence of a gene with a different base without causing the amino acid sequence of the polypeptide produced from the gene to be changed. Hence, the DNA of the present invention may also have any base sequence that has been changed from any polynucleotide sequence in the Sequence Listing by substitution in accordance with degeneracy of the genetic code. References describing codon usage are readily publicly available.

[0127] The skilled artisan will further appreciate that changes can be introduced by mutation of the nucleotide sequences of the invention thereby leading to changes in the amino acid sequence of the encoded toxin proteins, without altering the biological activity of the proteins. Thus, variant isolated nucleic acid molecules can be created by introducing one or more nucleotide substitutions, additions, or deletions into the corresponding nucleotide sequence disclosed herein, such that one or more amino acid substitutions, additions or deletions are introduced into the encoded protein. Mutations can be introduced by standard techniques, such as site-directed mutagenesis and PCR-mediated mutagenesis. Such variant nucleotide sequences are also encompassed by the present invention.

[0128] For example, conservative amino acid substitutions may be made at one or more predicted, nonessential amino acid residues. A “nonessential” amino acid residue is a residue that can be altered from the wild-type sequence of a toxin protein without altering the biological activity, whereas an “essential” amino acid residue is required for biological activity. A “conservative amino acid substitution” is one in which the amino acid residue is replaced with an amino acid residue having a similar side chain. Families of amino acid residues having similar side chains have been defined in the art. These families include amino acids with basic side chains (e.g., lysine, arginine, histidine), acidic side chains (e.g., aspartic acid, glutamic acid), uncharged polar side chains (e.g., glycine, asparagine, glutamine, serine, threonine, tyrosine, cysteine), nonpolar side chains (e.g., alanine, valine, leucine, isoleucine, proline, phenylalanine, methionine, tryptophan), beta-branched side chains (e.g., threonine, valine, isoleucine) and aromatic side chains (e.g, tyrosine, phenylalanine, tryptophan, histidine).

[0129] As discussed elsewhere herein, delta-endotoxins generally have five conserved sequence domains, and three conserved structural domains (see, for example, de Maagd et al., 2001, supra). The first conserved structural domain consists of seven alpha helices and is involved in membrane insertion and pore formation. Domain II consists of three beta-sheets arranged in a Greek key configuration, and domain III consists of two antiparallel beta-sheets in “jelly-roll” formation (de Maagd et al., 2001, supra). Domains II and III are involved in receptor recognition and binding, and are therefore considered determinants of toxin specificity. Amino acid substitutions may be made in nonconserved regions that retain function. In general, such substitutions would not be made for conserved amino acid residues, or for amino acid residues residing within a conserved motif, where such residues are essential for protein activity. Examples of residues that are conserved and that may be essential for protein activity include, for example, residues that are identical between all proteins contained in an alignment of the amino acid sequences of the present invention and known toxin sequences. Examples of residues that are conserved but that may allow conservative amino acid substitutions and still retain activity include, for example, residues that have only conservative substitutions between all proteins contained in an alignment of the amino acid sequences of the present invention and known toxin sequences. However, one of skill in the art would understand that functional variants may have minor conserved or nonconserved alterations in the conserved residues.

[0130] Alternatively, variant nucleotide sequences can be made by introducing mutations randomly along all or part of the coding sequence, such as by saturation mutagenesis, and the resultant mutants can be screened for ability to confer toxin activity to identify mutants that retain activity. Following mutagenesis, the encoded protein can be expressed recombinantly, and the activity of the protein can be determined using standard assay techniques.

[0131] Using methods such as PCR, hybridization, and the like corresponding toxin sequences can be identified, such sequences having substantial identity to the sequences of the invention. See, for example, Sambrook and Russell (2001, supra.)

[0132] Polynucleotides of the present invention that are variants of the polynucleotides provided herein will generally demonstrate significant identity with the polynucleotides provided herein. Of particular interest are polynucleotide homologs having at least about 50% sequence identity, at least about 60% sequence identity, at least about 70% sequence identity, at least about 80% sequence identity, at least about 85% sequence identity, and more preferably at least about 90%, 95% or even greater, such as 96%, 97%, 98% or 99% sequence identity with any one of the polynucleotide sequences described herein.

[0133] The skilled artisan will further appreciate that once a novel toxin gene is identified, the nucleic acid molecules and fragments thereof corresponding to the novel toxin gene may then be used to identify the microbial strains or isolates in which the extrachromosomal genetic content naturally comprises a nucleic acid sequence identical to that of the novel toxin gene of interest. Such microbial strains or isolates can be readily identified by using the above-described nucleic acid molecules or fragments thereof to screen a microbial population. Screening of bacterial colonies by using PCR or DNA-based hybridization methods, antibody-based hybridization methods, among other well-known methods, is routine in the art.

[0134] Nucleic acid molecules and fragments thereof of the present invention may be employed to obtain other nucleic acid molecules from the same species. Such nucleic acid molecules include the nucleic acid molecules that have the complete coding sequence of a protein and promoters and flanking sequences of such molecules. In addition, such nucleic acid molecules include nucleic acid molecules that encode for other toxins or gene family members. Such molecules can be readily obtained by using the above-described nucleic acid molecules or fragments thereof to screen cDNA libraries or extrachromosomal DNA libraries obtained from toxin-producing microorganisms. Methods for generating such libraries are well known in the art.

[0135] Nucleic acid molecules and fragments thereof of the present invention may also be employed to obtain nucleic acid homologues. Such homologues include the nucleic acid molecules of different alleles within the same species or other organisms, including the nucleic acid molecules that encode, in whole or in part, toxin protein homologues of other organisms, sequences of genetic elements such as promoters and transcriptional regulatory elements. Such molecules can be readily obtained by using the above-described nucleic acid molecules or fragments thereof to screen cDNA libraries or extrachromosomal DNA libraries obtained from such microorganism species. Methods for generating such libraries are well known in the art. Such homologue molecules may differ in their nucleotide sequences from those found in one or more of the nucleotides in the Sequence Listing or complements thereof because complete complementarity is not needed for stable hybridization. The nucleic acid molecules of the present invention therefore also include molecules that, although capable of specifically hybridizing with the nucleic acid molecules may lack “complete complementarity.” In a particular embodiment, methods of 3′ or 5′ RACE may be used to obtain such sequences.

[0136] Any of a variety of methods known in the art may be used to obtain one or more of the above-described nucleic acid molecules. Automated nucleic acid synthesizers can be employed for this purpose. In lieu of such synthesis, the disclosed nucleic acid molecules can be used to define a pair of primers that can be used with the polymerase chain reaction to amplify and obtain any desired nucleic acid molecule or fragment, which is standard in the art.

[0137] Further, the degeneracy of the genetic code, which allows different nucleotide sequences to code for the same protein or peptide, is also known in the art.

[0138] In an aspect of the present invention, one or more of the nucleic acid molecules of the present invention differ in nucleotide sequence from those encoding a toxin polypeptide or fragment thereof selected from the group consisting of the nucleotide sequences in the Sequence Listing due to the degeneracy in the genetic code in that they encode the same protein but differ in nucleotide sequence.

[0139] Also provided in another further aspect of the present invention are one or more of the nucleic acid molecules that differ in nucleotide sequence from those encoding a toxin polypeptide or fragment thereof selected from the group consisting of the nucleotide sequences in the Sequence Listing due to fact that the different nucleotide sequences encode a polypeptide having one or more conservative amino acid residues. It is understood that genetic codons capable of coding for such conservative substitutions are well known in the art.

[0140] This invention also provides polypeptides that are encoded by the polynucleotides of the invention. It is known in the art that one or more amino acids in a sequence can be substituted with other amino acid(s), the charge and polarity of which are similar to that of the substituted amino acid, i.e. a conservative amino acid substitution, resulting in a biologically/functionally silent change. Conservative substitutes for an amino acid within the polypeptide sequence can be selected from other members of the class to which the amino acid belongs. Amino acids can be divided into the following four groups: (1) acidic (negatively charged) amino acids, such as aspartic acid and glutamic acid; (2) basic (positively charged) amino acids, such as arginine, histidine, and lysine; (3) neutral polar amino acids, such as serine, threonine, tyrosine, asparagine, and glutamine; and (4) neutral nonpolar (hydrophobic) amino acids such as glycine, alanine, leucine, isoleucine, valine, proline, phenylalanine, tryptophan, cysteine, and methionine.

[0141] Conservative amino acid changes within the native polypeptides' sequence can be made by substituting one amino acid within one of these groups with another amino acid within the same group. Biologically functional equivalents of the polypeptides or fragments thereof of the present invention can have about 10 or fewer conservative amino acid changes, more preferably about 7 or fewer conservative amino acid changes, and most preferably about 5 or fewer conservative amino acid changes. In a preferred embodiment of the present invention, the polypeptide has between about 5 and about 500 conservative changes, more preferably between about 10 and about 300 conservative changes, even more preferably between about 25 and about 150 conservative changes, and most preferably between about 5 and about 25 conservative changes or between 1 and about 5 conservative changes. The encoding nucleotide sequence will thus have corresponding base substitutions, permitting it to encode biologically functional equivalent forms of the proteins or fragments of the present invention.

[0142] In another aspect of the present invention, biotoxin polypeptides are also encompassed within the present invention. In an embodiment of this aspect, by “biotoxin polypeptide” is intended a polypeptide having an amino acid sequence comprising any one of the amino acid sequences set forth in the Sequence Listing. In some embodiments, the biotoxin polypeptides are encoded by a nucleic acid molecule including a nucleic acid sequence corresponding to any one of the nucleotide sequences in the Sequence Listing; or a nucleic acid sequence hybridizing under high stringency conditions to any one of the nucleotide sequences in the Sequence Listing, a complement thereof or a fragment of either; a nucleic acid sequence exhibiting 70% or greater sequence identity to any one of the nucleotide sequences in the Sequence Listing, a complement thereof or a fragment of either. In some embodiments, the biotoxin polypeptides exhibit 50% or greater sequence identity to any one of the amino acid sequences in the Sequence Listing.

[0143] As described in more detail elsewhere herein, biotoxin polypeptides can be effective in, for example, conferring pesticidal activity to a recombinant organism when expressed in such organism or in controlling a pest organism. Such biotoxin polypeptides typically contain at least one domain indicative of pesticidal activity. Examples of Pfam domains indicative of pesticidal activity that Applicants have identified in the biotoxin polypeptides described herein include Endotoxin_M (PF00555) domain (see, e.g., Li et al., Nature 353: 815-21, 1991; Cygler et al., J. Mol. Biol. 254 (3): 447-464, 1995; Ghosh et al., Acta Crystallogr. D 57: 1101-1109, 2001); Ricin_Blectin (PF00652) domain, Aerolysin (PF01117) domain (see, e.g., Howard et al., J. Bacteriol. 169: 2869-71, 1987; Parker et al., Nature 367: 292-5, 1994); Bac_thur_toxin (PF01338) domain (see, e.g., Li et al., J. Mol. Biol. 257:129-152, 1996); ETX_MTX2 (PF03318) domain (see, e.g., Thanabalu et al., Gene 170:85-89, 1996; Petit et al., J. Biol. Chem. 276:15736-15740, 2001); CBM_{—}6 (PF03422) domain (see, e.g., Henshaw et al., J. Biol. Chem. 279: 21552-21559, 2004); Binary_toxB (PF03495) domain (see, e.g., De Haan et al., Mol. Membr. Biol. 21: 77-92, 2004; Perelle et al., Infect. Immun. 61: 5147-56, 1993); ADPrib_exo_Tox (PF03496) domain (see, e.g., De Haan et al., 2004, supra; Perelle et al., 1993, supra); Endotoxin_C (PF03944) domain (see, e.g., Li et al., 1991, supra; Cygler et al., 1995, supra; Ghosh et al., 2001, supra); Endotoxin_N(PF03945) domain (see, e.g., Li et al., 1991, supra; Cygler et al., 1995, supra; Ghosh et al., 2001, supra), Toxin 10 (PF05431) domain (see, e.g., Humphreys et al., J. Invertebr. Pathol. 71:184-185, 1998); Botulinum HA-17 (PF05588) domain (see, e.g., Hutson et al., J. Biol. Chem. 271:10786-10792, 1996); CryBP1 (PF07029) domain (see, e.g., Dervyn et al., J. Bacteriol. 177:2283-2291, 1995; Zhang et al., J. Bacteriol. 179:4336-4341, 1997); PA14 (PF07691) domain (see, e.g., Rigden et al., Trends Biochem. Sci. 29:335-339, 2004); and Fve (PF09259) domain (see, e.g., Paaventhan et al., J Mol Biol. 332:461-470, 2003). More detailed description of specific Pfam domains can be found at various information sources, such as “www.sanger.ac.uk” or “pfam.janelia.org”. Further, specific polypeptides that are predicted to contain one or more indicative Pfam domains are described in great detail in the accompanying Sequence Listing. Thus, various practical applications of the biotoxin sequences in the sequence listing are immediately apparent to those of skill in the art based on their similarity to known sequences.

[0144] Fragments, biologically active portions, and variants thereof are also provided, and may be used to practice the methods of the present invention. “Fragments” or “biologically active portions” include polypeptide fragments comprising amino acid sequences sufficiently identical to any one of the amino acid sequences set forth in the Sequence Listing and that exhibit pesticidal activity. A biologically active portion of a toxin protein can be a polypeptide that is, for example, 10, 25, 50, 100 or more amino acids in length. Such biologically active portions can be prepared by recombinant techniques and evaluated for pesticidal activity. Methods for measuring pesticidal activity are well known in the art. See, for example, Czapla and Lang J. Econ. Entomot. 83:2480-2485 (1990); Andrews et al., Biochem. J. 252:199-206 (1988); Marrone et al., J. of Economic Entomology 78:290-293 (1985); WO2011009182A2; and U.S. Pat. No. 5,743,477. As used here, a fragment comprises at least 8 contiguous amino acids of any one of the amino acid sequences set forth in the Sequence Listing. The invention encompasses other fragments, however, such as any fragment in the protein greater than about 10, 20, 30, 50, 100, 150, 200, 250, 300, 350, 400, 400, 450, 500, 550, 600, 650, 700, 750, 800, 850, 900, 950, 1000, 1050, 1100, 1150, 1200, 1250, or 1300 amino acids.

[0145] As described elsewhere herein, by “variants” is intended proteins or polypeptides having an amino acid sequence that is at least about 60%, 65%, about 70%, 75%, about 80%, 85%, about 90%, 91%, 92%, 93%, 94%, 95%, 96%, 97%, 98% or 99% identical to any one of the amino acid sequences set forth in the Sequence Listing. Variants also include polypeptides encoded by a nucleic acid molecule that hybridizes to a nucleic acid molecule having a nucleotide sequence that comprises any one of the nucleotide sequences of the Sequence Listing, or a complement thereof, under stringent conditions. Variants include polypeptides that differ in amino acid sequence due to mutagenesis. Variant proteins encompassed by the present invention are biologically active, that is they continue to possess the desired biological activity of the native protein, which is retaining pesticidal activity. Methods for measuring pesticidal activity are well known in the art. See, for example, Czapla and Lang (1990, supra); Andrews et al., Biochem. J. (1988, supra); Marrone et al., (1985, supra); PCT Publication No. WO2011009182A2; and U.S. Pat. No. 5,743,477.

### Altered or Improved Variants

[0146] It is contemplated that DNA sequences of a toxin may be altered by various methods, and that these alterations may result in DNA sequences encoding proteins with amino acid sequences different than that encoded by a toxin of the present invention. This protein may be altered in various ways including amino acid substitutions, deletions, truncations, and insertions of one or more amino acids of the sequences set forth in the Sequence Listing, including up to about 2, about 3, about 4, about 5, about 6, about 7, about 8, about 9, about 10, about 15, about 20, about 25, about 30, about 35, about 40, about 45, about 50, about 55, about 60, about 65, about 70, about 75, about 80, about 85, about 90, about 100, about 105, about 110, about 115, about 120, about 125, about 130 or more amino acid substitutions, deletions or insertions.

[0147] Methods for such manipulations are generally known in the art. For example, amino acid sequence variants of a toxin protein can be prepared by mutations in the DNA. This may also be accomplished by one of several forms of mutagenesis and/or in directed evolution. In some aspects, the changes encoded in the amino acid sequence will not substantially affect the function of the protein. Such variants will possess the desired pesticidal activity. However, it is understood that the ability of a toxin to confer pesticidal activity may be improved by the use of such techniques upon the compositions of this invention. For example, one may express a toxin in host cells that exhibit high rates of base-misincorporation during DNA replication, such as XL-1 Red (Stratagene). After propagation in such strains, one can isolate the toxin DNA (for example by preparing plasmid DNA, or by amplifying by PCR and cloning the resulting PCR fragment into a vector), culture the toxin mutations in a non-mutagenic strain, and identify mutated toxin genes with pesticidal activity, for example by performing an assay to test for pesticidal activity.

[0148] Alternatively, alterations may be made to the protein sequence of many proteins at the amino or carboxy terminus without substantially affecting activity. This can include insertions, deletions, or alterations introduced by modern molecular methods, such as PCR, including PCR amplifications that alter or extend the protein coding sequence by virtue of inclusion of amino acid encoding sequences in the oligonucleotides utilized in the PCR amplification. Alternatively, the protein sequences added can include entire protein-coding sequences, such as those used commonly in the art to generate protein fusions. Such fusion proteins are often used to (1) increase expression of a protein of interest (2) introduce a binding domain, enzymatic activity, or epitope to facilitate either protein purification, protein detection, or other experimental uses known in the art (3) target secretion or translation of a protein to a subcellular organelle, such as the periplasmic space of Gram-negative bacteria, or the endoplasmic reticulum of eukaryotic cells, the latter of which often results in glycosylation of the protein.

[0149] Variant nucleotide and amino acid sequences of the present invention also encompass sequences derived from mutagenic and recombinogenic procedures such as DNA shuffling. With such a procedure, one or more different toxin protein coding regions can be used to create a new toxin protein possessing the desired properties. In this manner, libraries of recombinant polynucleotides are generated from a population of related sequence polynucleotides comprising sequence regions that have substantial sequence identity and can be homologously recombined in vitro or in vivo. For example, using this approach, sequence motifs encoding a domain of interest may be shuffled between a toxin gene of the invention and other known toxin genes to obtain a new gene coding for a protein with an improved property of interest, such as an increased insecticidal activity. Strategies for such DNA shuffling are known in the art.

[0150] Domain swapping or shuffling is another mechanism for generating altered delta-endotoxin proteins. Domains II and III may be swapped between delta-endotoxin proteins, resulting in hybrid or chimeric toxins with improved pesticidal activity or target spectrum. Methods for generating recombinant proteins and testing them for pesticidal activity are well known in the art.

[0151] The skilled artisan will further appreciate that any of a variety of methods well known in the art may be used to obtain one or more of the above-described polypeptides. The polypeptides of the invention can be chemically synthesized or alternatively, polypeptides can be made using standard recombinant techniques in heterologous expression systems such as E. coli, yeast, insects, etc.

[0152] Bacterial genes quite often possess multiple methionine initiation codons in proximity to the start of the open reading frame. Often, translation initiation at one or more of these start codons will lead to generation of a functional protein. These start codons can include ATG codons. However, bacteria such as Bacillus sp. also recognize the codon GTG as a start codon, and proteins that initiate translation at GTG codons contain a methionine at the first amino acid. Furthermore, it is not often determined a priori which of these codons are used naturally in the bacterium. Thus, it is understood that use of one of the alternate methionine codons may also lead to generation of toxin proteins that encode pesticidal activity. These toxin proteins are encompassed in the present invention and may be used in the methods of the present invention.

### Information in the Sequence Listing

[0153] This specification contains nucleotide and polypeptide sequence information prepared using the program Patentln Version 3.5. The biotoxin sequences provided in the Sequence Listing are annotated to indicate one or several known homologs of the respective sequences. Some sequences contain “pfam” domains which are indicative of particular applications. The specific pfam domains are described in more detail by various sources, such as “www.sanger.ac.uk” or “pfam.janelia.org”. Thus, various practical applications of the biotoxin sequences in the sequence listing are immediately apparent to those of skill in the art based on their similarity to known sequences.

[0154] The biotoxin sequences provided in the Sequence Listing are annotated to indicate one or several known homologs of the respective sequences. Some sequences contain “Pfam” domains which are indicative of pesticidal activity. Pfam domains indicative of pesticidal activity that Applicants have identified in the biotoxin polypeptides described herein include Endotoxin_M (PF00555) domain, Ricin B lectin (PF00652) domain, Aerolysin (PF01117) domain, Bac_thur_toxin (PF01338) domain, ETX_MTX2 (PF03318) domain, CBM_{—}6 (PF03422) domain, Binary_toxB (PF03495) domain, ADPrib_exo_Tox (PF03496) domain, Endotoxin_C(PF03944) domain, Endotoxin_N(PF03945) domain, Toxin_{—10} (PF05431) domain, Botulinum HA-17 (PF05588) domain, CryBP1 (PF07029) domain, PA14 (PF07691) domain, and Fve (PF09259) domain. Some biotoxin sequences in the Sequence Listing are annotated in the “miscellaneous features” section with valuable applications of the respective sequences in, for example, conferring pesticidal activity to an organism, or in controlling a pest organism. Thus, various practical applications of the biotoxin sequences in the Sequence Listing are immediately apparent to those of skill in the art based on their similarity to known sequences.

[0155] Additional information of sequence applications comes from similarity to sequences in public databases. Entries in the “miscellaneous features” sections of the Sequence Listing labeled “NCBI GI:” and “NCBI Desc:” provide additional information regarding the respective sequences. In some cases, the corresponding public records, which may be retrieved from www.ncbi.nlm.nih.gov, cite publications with data indicative of uses of the annotated sequences.

[0156] From the disclosure of the Sequence Listing, it can be seen that the nucleotides and polypeptides of the inventions are sometimes useful, depending upon the respective individual sequence, to make transgenic organisms having one or more altered characteristics such as, for example, pesticidal activity. The present invention further encompasses nucleotides that encode the above described polypeptides, such as those included in the Sequence Listing, as well as the complements and/or fragments thereof, and include alternatives thereof based upon the degeneracy of the genetic code.

[0157] Some aspects of the present invention relate to an integrated strategy for isolation and identification of novel nucleotide sequences that encode biotoxins. By “novel nucleotide sequences” is intended nucleotide sequences that share less than about 30% sequence identity, preferably less than about 60% sequence identity, more preferably less than about 80% sequence identity, most preferably less than about 90%, 91%, 92%, 93%, 94%, 95%, 96%, 97%, 98%, or 99% sequence identity to any sequence in the database used for comparison.

[0158] Antibodies to the polypeptides of the present invention, or to variants or fragments thereof, are also encompassed. A variety of techniques and methods for producing antibodies are well known in the art (see, for example, Harlow and Lane (1988) Antibodies: A Laboratory Manual, Cold Spring Harbor Laboratory, Cold Spring Harbor, N.Y.; U.S. Pat. No. 4,196,265), and can be used to make an antibody according to the invention disclosed herein.

### Use of the Method of the Invention

[0159] The method described herein is useful for generating large metagenomic sequence datasets containing gene sequences of commercial value. Isolation and sequence of extrachromosomal nucleic acids specific to bacteria has several advantages over current methods for gene identification. First, since genes are identified by DNA sequence, this method is more likely to identify genes with lower DNA similarity to known genes than can readily be accomplished by hybridization. Second, since the extrachromosomal genomes of microbial strains will be a fraction of the total genome size (1-20%), it will be possible to rapidly sample the extrachromosomal genomes of many related or unrelated bacteria, and quickly identify interesting genes. Third, since much of strain-to-strain variation exists due to differences in extrachromosomal genetic content; this method will be very efficient at capturing the major diversity differences in bacterial groups. Furthermore, the efficiency of the method increases as the size of the existing sequence dataset increases. For any given microorganism, as the percent of novel clones detected can drop from 50% to 1%, the efficiency of the method disclosed herein may increase from 3-fold to 16-fold relative to sequencing the entire genome (for a 15 kb insert size).

[0160] Though only specific bacterial species are described herein, it is understood that the methods of the present invention can virtually be applied to all microorganisms that contain extrachromosomal DNA, including bacterial and fungal species. Extrachromosomal DNA can be isolated from these microorganisms and utilized in a method according to the present invention to identify novel toxin genes. Furthermore, it is understood that one may not need necessarily to isolate and/or purify the microbial cells in order to isolate and analyze its extrachromosomal DNA content; i.e. this method can be applied to samples from mixed populations, or of unknown origin, such as environmental samples.

[0161] Accordingly, some embodiments of the invention provide novel systems to screen mixed populations of microorganisms, enriched samples, or isolates thereof for polynucleotides encoding molecules having a toxin activity, so long as the microbial samples, strains, or isolates contain at least a toxin gene carried by extrachromosomal DNA. The method(s) of the invention allow the discovery of novel toxin molecules in vitro, and in particular novel toxin molecules derived from uncultivated or cultivated samples. Large populations of extrachromosomal DNA can be isolated, sequenced and screened using the method(s) of the invention. If so desired, the method(s) of the invention may allow one to screen and identify polynucleotides and the polypeptides encoded by these polynucleotides in vitro from a wide range of environmental samples.

[0162] In another embodiment, extrachromosomal nucleic acids of a plurality of isolates can be pooled after individual extractions to create a population of extrachromosomal nucleic acids that is suitable for subsequent sequencing, assembly, annotation, and gene identification. Alternatively, a plurality of microbial isolates can be combined prior to DNA extraction step, which also ultimately creates a population of extrachromosomal nucleic acids. Two or more of the populations of extrachromosomal nucleic acids can be pooled or combined to obtain a pooled population of extrachromosomal nucleic acids.

[0163] The microorganisms from which the extrachromosomal DNA may be isolated include prokaryotic microorganisms, such as Eubacteria and Archaebacteria, lower eukaryotic microorganisms such as fungi, algae and protozoa. The microorganisms may be cultured microorganisms or uncultured microorganisms obtained from environmental samples and include extremophiles, such as thermophiles, hyperthermophiles, psychrophiles and psychrotrophs. Of particular interest include but not limited to species of the bacterial genera Bacillus, Brevibacillus, Clostridia, Paenibacillus, Photorhabdus, Pseudomonas, Serratia, Streptomyces, or Xenorhabdus.

[0164] In one particular non-limiting exemplification, insecticidal proteins such as the Bacillus thuringiensis delta-endotoxin genes are often found on large extrachromosomal DNA molecules, and therefore can be rapidly discovered by using the screening methods disclosed herein. Thus isolation and sequencing of extrachromosomal DNA from Bacillus microorganisms, such as Bacillus thuringiensis is likely to lead to identification of novel delta-endotoxin genes. Such genes are likely to be valuable for the development of novel compositions and methods for controlling insect pests. In addition, many microorganisms of the genus Clostridia are also known to have large extrachromosomal plasmids, and some of these are known to contain virulence factors as well as toxins such as iota toxin (see, e.g., Perelle et al., Infect. Immun. 1993). Furthermore, it has been shown that the majority of gene variability of Clostridia microorganisms appears to occur due to plasmid content (see, e.g., Katayam et al., Mol. Gen. Genet. 1996). It is contemplated by the present inventors that the methods disclosed herein can be used to screen extrachromosomal DNA content of multiple Clostridia isolates to quickly capture a large amount of genetic diversity. In addition, there has been report of a homolog of delta-endotoxin gene present in Clostridia species (Barloy et al., J. Bacteriol. 1996). Thus applications of screening methods in accordance with the present invention can also be used in identifying novel bioxin genes in bacteria of this genus.

[0165] In addition, tumor-inducing and symbiotic plasmids are common in Agrobacterium and Rhizobium microorganisms (e.g., Van Larebeke et al., Nature 1974). Thus applications of a screening method in accordance with the present invention to the sequencing of bacterial tumor-inducing and symbiotic plasmids, especially those from known plant pathogens, is likely to identify novel genes involved in plant-pathogen interactions including genes involved in or required for both virulence and avirulence.

[0166] Further examples of microorganisms from which the extrachromosomal DNA content may be decoded using the methods provided herein include species of the bacterial genus Serratia where extrachromosomal DNA, such as pADAP plasmid of S. entomophila and pU143 plasmid of S. proteamaculans, are known to contain virulence associated regions (see, e.g., Hurst et al., Plasmid, 2011; Hurst et al., J. Bacteriol. 2000). Within a virulence-encoding region of the pADAP plasmid of S. entomophila, at least one gene cluster designated sepABC is important for S. entomophila pathogenicity. The Sep proteins are members of the Toxin complex (Tc) family of insecticidal proteins that were first identified in the nematode-associated bacteria Photorhabdus luminescens. The three Tc proteins Tc-A, Tc-B, and Tc-C typically combine to form a complex with insecticidal activity. A second pADAP virulence-encoding region contains 18 ORFs, the translated products of which have similarity to the Photorhabdus virulence cassettes (PVCs) that reside in the genome of the insecticidal bacterium P. luminescens TTO1. Therefore, the present inventors also contemplate that applications of screening methods in accordance with the present invention to decode the extrachromosomal genetic content of Serratia bacteria may identify novel sequences involved in or required for insecticidal activity as well as virulence and avirulence.

[0167] Furthermore, much of the diversity present in bacterial populations is present on extrachromosomal DNA content, including plasmids. Many of microbial plasmids are known to contain virulence factors, important for infectivity or severity of infection by bacteria pathogens. Correspondingly, it is likely that many of the proteins expressed by plasmid genomes are likely to have value as vaccines. For example, both plasmids pXO1 and pXO2 of Bacillus anthracis encode proteins required for pathogenesis during anthrax infection. For example, pXO2 encodes proteins that produce a protective capsule around the bacterium. The pXO1 plasmid encodes the three proteins of the anthrax toxin complex, lethal factor (LF), edema factor (EF), and the protective antigen (PA). The PA protein (protective antigen) forms the basis of a vaccine for anthrax. The present applicants contemplate that the rapid and efficient sequencing of bacterial plasmids by using a screening method disclosed herein will yield information with which one can create a database of proteins that might serve as effective vaccines.

### Use of the Molecules of the Invention

[0168] In one aspect of the invention, one may use one of many known methods to identify DNA sequences adjacent to polynucleotide sequences of interest. For example, one may further identify genomic regions that naturally surround a novel polynucleotide sequence in microbial cell. One may accomplish this by generating hybridization probes and screening an existing library of extrachromosomal DNA. Alternatively, one may generate a library of larger inserts (for example a cosmid library), and screen for clones likely to contain DNA adjacent to the novel polynucleotide sequence of interest. For example, one may clone and sequence regions flanking a known DNA by inverse PCR (Sambrook and Russell, supra). Another such method involves ligating linkers of known sequence to extrachromosomal DNA digested with restriction enzymes, then generating PCR product using an oligonucleotide homologous to the oligo linker, and an oligo homologous to the region of interest (e.g. the end sequence of a novel polynucleotide sequence of the invention). A kit for performing this procedure (GENOMEWALKER™, Clonetech) is available commercially.

[0169] For example, in a hybridization procedure, all or part of a toxin-encoding nucleotide sequences can be used to screen cDNA or genomic libraries. Methods for construction of such cDNA and genomic libraries are generally known in the art and are disclosed in Sambrook and Russell (2001, supra). The so-called hybridization probes may be genomic DNA fragments, cDNA fragments, RNA fragments, or other oligonucleotides, and may be labeled with a detectable group such as ³²P, or any other detectable marker, such as other radioisotopes, a fluorescent compound, an enzyme, or an enzyme co-factor. Probes for hybridization can be made by labeling synthetic oligonucleotides based on the known toxin-encoding nucleotide sequence disclosed herein. Degenerate primers designed on the basis of conserved nucleotides or amino acid residues in the nucleotide sequence or encoded amino acid sequence can additionally be used. The probe typically comprises a region of nucleotide sequence that hybridizes under stringent conditions to at least about 12, at least about 25, at least about 50, 75, 100, 125, 150, 175, 200, 250, 300, 350, or 400 consecutive nucleotides of toxin encoding nucleotide sequence of the invention or a fragment or variant thereof. Methods for the preparation of probes for hybridization are generally known in the art and are disclosed in Sambrook and Russell (2001, supra) herein incorporated by reference.

[0170] Hybridization of such sequences may be carried out using hybridization conditions under which a probe will hybridize to its target sequence to a detectably greater degree than to other sequences (e.g., typically at least 2-fold over background). Hybridization conditions are sequence-dependent and will be different in different circumstances. By controlling the stringency of the hybridization and/or washing conditions, target sequences that are 100% complementary to the probe can be identified (homologous probing). Alternatively, hybridization conditions can be adjusted to allow some mismatching in sequences so that lower degrees of similarity are detected (heterologous probing). Generally, a probe is less than about 1000 nucleotides in length, preferably less than 500 nucleotides in length, more preferably less than 200 nucleotides in length, and most preferably less than 100 nucleotides in length.

[0171] While many of the commercial uses of the resulting sequences can be apparent from direct inspection of the resulting sequences, one may perform additional steps to identify further commercial uses of the resulting sequences or genes.

### Conferring Pest Resistance to Crop Plants

[0172] In another aspect of the invention, methods are provided for the generation of transgenic organisms, particularly transgenic plants expressing a toxin that has pesticidal activity, which typically involves introducing a nucleic acid construct into an organism. For example, by “introducing” is intended to present to the plant the nucleic acid construct in such a manner that the construct gains access to the interior of a cell of the plant. The methods of the invention do not require that a particular method for introducing a nucleotide construct to a plant is used, only that the construct gains access to the interior of at least one cell of the plant. Methods described in details below by way of example may be utilized to generate transgenic plants, but the manner in which the transgenic plant cells are generated is not critical to this invention.

[0173] The transgenic plants of the invention may express one or more of the pesticidal sequences disclosed herein. In various embodiments, the transgenic plant further comprises one or more additional genes for insect resistance, for example, one or more additional genes for controlling coleopteran, lepidopteran, heteropteran, or nematode pests. It will be understood by one of skill in the art that the transgenic plant may comprise any gene imparting an agronomic trait of interest.

[0174] A variety of methods for introducing nucleic acid constructs into plants are known in the art including, but not limited to, stable transformation methods, transient transformation methods, and virus-mediated methods. Plants expressing a toxin may be subsequently isolated by common methods described in the art, for example by transformation of callus, selection of transformed callus, and regeneration of fertile plants from such transgenic callus. In such process, one may use any gene as a selectable marker so long as its expression in plant cells confers ability to identify or select for transformed cells.

### Expression Vectors

[0175] One or more of the polypeptides or fragments thereof encoded by the nucleic acid molecules of the present invention may be expressed in a transformed cell or transformed organism. For example, to use the sequences of the present invention or a combination of them or parts and/or mutants and/or fusions and/or variants of them, recombinant nucleic acid constructs may be prepared which comprise the polynucleotide sequences of the invention inserted into a vector, and which are suitable for transformation of plant cells. The construct can be made using standard recombinant DNA techniques and can be introduced to the species of interest by Agrobacterium-mediated transformation or by other means of transformation as referenced below. In addition, the microbial toxin sequences of the invention may be modified or codon-optimized to obtain or enhance expression of the corresponding polypeptide in host cells, e.g., plant cells. Typically a construct that expresses such a toxin polypeptide would contain a promoter to drive transcription of the gene, as well as a 3′ untranslated region to allow transcription termination and polyadenylation. The organization of such constructs is well known in the art. In some instances, it may be useful to engineer the gene such that the resulting peptide is secreted, or otherwise targeted within the plant cell. For example, the gene can be engineered to contain a signal peptide to facilitate transfer of the peptide to the endoplasmic reticulum. It may also be preferable to engineer the plant expression cassette to contain an intron, such that mRNA processing of the intron is required for expression.

[0176] The vector backbone may be any of those typically used in the field such as plasmids, viruses, artificial chromosomes, BACs, YACs, PACs and vectors such as, for instance, bacteria-yeast shuttle vectors, lambda phage vectors, T-DNA fusion vectors and plasmid vectors.

[0177] Typically, the construct comprises a vector containing a nucleic acid molecule of the present invention with any desired transcriptional and/or translational regulatory sequences such as, for example, promoters, UTRs, and 3′ end termination sequences. Vectors may also include, for example, origins of replication, scaffold attachment regions (SARs), markers, homologous sequences, and introns. The vector may also comprise a marker gene that confers a selectable phenotype on plant cells. The marker may preferably encode a biocide resistance trait, particularly antibiotic resistance, such as resistance to, for example, kanamycin, bleomycin, or hygromycin, or herbicide resistance, such as resistance to, for example, glyphosate, chlorsulfuron or phosphinothricin.

[0178] In some instances, recombinant DNA constructs can include heterologous transcriptional signals and/or translational initiation signals that are added to the protein-encoded DNA fragments so that such DNA fragments can subsequently be transcribed and translated. The addition of new transcriptional and translational signals can be achieved by a variety of techniques including those commonly known in the art. For example, PCR-based methods or standard recombinant DNA cloning techniques can be used to add transcriptional start signal, and add a new ATG initiation codon in-frame to the protein coding regions of the DNA fragments.

[0179] It will be understood that more than one regulatory region may be present in a recombinant vector, e.g., promoters, introns, enhancers, upstream activation regions, transcription terminators, and inducible elements. For example, a suitable enhancer is a cis-regulatory element (−212 to −154) from the upstream region of the octopine synthase (ocs) gene. Fromm et al., Plant Cell 1:977-984 (1989). Thus, more than one regulatory region can be operably linked to a nucleic acid sequence of interest.

[0180] Promoters which are known or are found to cause transcription of DNA in host cells, e.g, plant cells or microbial cells; can be used in the present invention. These promoters may be obtained from a variety of sources, such as microbes, plants and plant viruses. Preferably, the particular promoter selected should be capable of causing sufficient expression to result in the production of an effective amount of a protein to cause the desired phenotype. In addition to promoters known to cause transcription of DNA in plant cells, other promoters may be identified for use in the current invention by screening a plant cDNA library or microbial cDNA library for genes which are selectively or preferably expressed in the target tissues or cells.

[0181] The choice of promoters to be included depends upon several factors, including but not limited to efficiency, selectability, inducibility, desired expression level, and cell- or tissue-preferential expression. One of skill in the art can routinely modulate the expression of a sequence by appropriately selecting and positioning promoters and other regulatory regions relative to the sequence.

[0182] A vector or construct may also include a transit peptide. Incorporation of a suitable chloroplast transit peptide may also be employed. Translational enhancers may also be incorporated as part of the vector DNA. DNA constructs could contain one or more 5′ non-translated leader sequences which may serve to enhance expression of the gene products from the resulting mRNA transcripts. Such sequences may be derived from the promoter selected to express the gene or can be specifically modified to increase translation of the mRNA. Such regions may also be obtained from viral RNAs, from suitable eukaryotic or prokaryotic genes, or from a synthetic gene sequence.

[0183] Constructs or vectors may also include, with the coding region of interest, a nucleotide sequence that acts, in whole or in part, to terminate transcription of that region. For example, such sequences have been isolated including the Tr7 3′ sequence and the nos 3′ sequence, or the like.

[0184] If proper polypeptide production is desired, a polyadenylation region at the 3′-end of the coding region is typically included. The polyadenylation region may be derived from the natural gene, from a variety of other plant genes or microbial genes, or from T-DNA, and may be synthesized in the laboratory.

### Plant Transformation

[0185] Nucleic acid molecules of the present invention may be introduced into the genome or the cell of the appropriate host plant by a variety of techniques. Transformation techniques as well as protocols for introducing nucleotide sequences into plants may vary depending on the type of plant or plant cell, i.e., monocot or dicot, targeted for transformation. These techniques, able to transform a wide variety of higher plant species, are well known and described in the technical and scientific literature. Generation of transgenic plants or transgenic plant cells may be performed by one of several methods including, but not limited to, transformation of plant cells by injection, microinjection, electroporation of DNA, fusion of cells or protoplasts, PEG-mediated transformation, use of biolistics, and via T-DNA using Agrobacterium tumefaciens or Agrobacterium rhizogenes or other bacterial hosts, for example.

[0186] In addition, a number of non-stable transformation methods that are well known to those skilled in the art may be desirable for the present invention. Such methods include, but are not limited to, transient expression and viral transfection.

[0187] Methods for transformation of chloroplasts are known in the art. See, for example, Svab et al., Proc. Natl. Acad. Sci. USA (1990); Svab and Maliga, Proc. Natl. Acad. Sci. USA (1993); Svab and Maliga, EMBO J. (1993). The method relies on particle gun delivery of DNA containing a selectable marker and targeting of the DNA to the plastid genome through homologous recombination. Additionally, plastid transformation can be accomplished by transactivation of a silent plastid-borne transgene by tissue-preferred expression of a nuclear-encoded and plastid-directed RNA polymerase. Such a system has been reported in McBride et al., Proc. Natl. Acad. Sci. USA (1994).

[0188] Seeds are obtained from the transformed plants and used for testing stability and inheritance. Generally, two or more generations are cultivated to ensure that the phenotypic feature is stably maintained and transmitted.

[0189] A person of ordinary skill in the art recognizes that after the expression cassette is stably incorporated in transgenic plants and confirmed to be operable, it can be introduced into other plants by sexual crossing. Any of a number of standard breeding techniques can be used, depending upon the species to be crossed.

[0190] It is also to be understood that two different transgenic plants can also be mated to produce offspring that contain two independently segregating added exogenous genes. Selfing of appropriate progeny can produce plants that are homozygous for both added exogenous genes. Back-crossing to a parental plant and out-crossing with a non-transgenic plant are also contemplated, as is vegetative propagation.

### Evaluation of Plant Transformation

[0191] Following introduction of heterologous foreign DNA into plant cells, the transformation or integration of heterologous gene in the plant genome can be confirmed by various methods such as analysis of nucleic acids, proteins and metabolites associated with the integrated gene.

[0192] PCR analysis is a rapid method, among others, to screen transformed cells, tissue or shoots for the presence of incorporated gene at the earlier stage before transplanting into the soil (Sambrook and Russell, Molecular Cloning: A Laboratory Manual. Cold Spring Harbor Laboratory Press, Cold Spring Harbor, N.Y. 2001). PCR can be carried out using oligonucleotide primers specific to the toxin gene of interest or Agrobacterium vector background, etc.

[0193] Plant transformation may be confirmed by Southern blot analysis of genomic DNA (Sambrook and Russell, 2001, supra). In general, total DNA is extracted from the transformant, digested with appropriate restriction enzymes, fractionated in an agarose gel and transferred to a nitrocellulose or nylon membrane. The membrane or “blot” is then probed with, for example, radiolabeled ³²P target DNA fragment to confirm the integration of introduced gene into the plant genome according to standard techniques (Sambrook and Russell, 2001, supra).

[0194] In Northern blot analysis, RNA is isolated from specific tissues of transformant, fractionated in a formaldehyde agarose gel, and blotted onto a nylon filter according to standard procedures that are routinely used in the art (e.g., Sambrook and Russell, 2001, supra). Expression of RNA encoded by the toxin is then tested by hybridizing the filter to a radioactive probe derived from a toxin, by methods known in the art (e.g., Sambrook and Russell, 2001, supra).

[0195] Western blot, biochemical assays and the like may be carried out on the transgenic plants to confirm the presence of protein encoded by the toxin gene by standard procedures (e.g., Sambrook and Russell, 2001, supra) using antibodies that bind to one or more epitopes present on the toxin protein.

[0196] As discussed above, a number of markers have been developed for use with plant cells, such as resistance to chloramphenicol, the aminoglycoside G418, hygromycin, or the like. Other genes that encode a product involved in chloroplast metabolism may also be used as selectable markers. Additionally, the genes disclosed herein are also useful as markers to assess transformation of bacterial cells or plant cells. Methods for detecting the presence of a transgene in a plant, plant organ (e.g., leaves, stems, roots, etc.), seed, plant cell, propagule, embryo or progeny of the same are well known in the art. In some embodiments, the presence of the transgene may be detected by testing for pesticidal activity.

[0197] Fertile plants expressing a toxin may be tested for pesticidal activity, and the plants showing optimal activity may be selected for further breeding. A variety of methods are available in the art to assay for pesticidal activity. Generally, the protein is mixed and used in feeding assays. See, for example Marrone et al., (1985, supra).

[0198] In principle, the methods and compositions according to the present invention can be deployed for any plant species. Monocotyledonous as well as dicotyledonous plant species are particularly suitable. The process is preferably used with plants that are important or interesting for agriculture, horticulture, for the production of biomass used in producing liquid fuel molecules and other chemicals, and/or forestry.

[0199] Thus, the invention has use over a broad range of plants, preferably higher plants pertaining to the classes of Angiospermae and Gymnospermae. Plants of the subclasses of the Dicotylodenae and the Monocotyledonae are particularly suitable. Dicotyledonous plants belong to the orders of the Aristochiales, Asterales, Batales, Campanulales, Capparales, Caryophyllales, Casuarinales, Celastrales, Cornales, Diapensales, Dilleniales, Dipsacales, Ebenales, Ericales, Eucomiales, Euphorbiales, Fabales, Fagales, Gentianales, Geraniales, Haloragales, Hamamelidales, Illiciales, Juglandales, Lamiales, Laurales, Lecythidales, Leitneriales, Magniolales, Malvales, Myricales, Myrtales, Nymphaeales, Papeverales, Piperales, Plantaginales, Plumbaginales, Podostemales, Polemoniales, Polygalales, Polygonales, Primulales, Proteales, Rafflesiales, Ranunculales, Rhamnales, Rosales, Rubiales, Salicales, Santales, Sapindales, Sarraceniaceae, Scrophulariales, Theales, Trochodendrales, Umbellales, Urticales, and Violales. Monocotyledonous plants belong to the orders of the Alismatales, Arales, Arecales, Bromeliales, Commelinales, Cyclanthales, Cyperales, Eriocaulales, Hydrocharitales, Juncales, Lilliales, Najadales, Orchidales, Pandanales, Poales, Restionales, Triuridales, Typhales, and Zingiberales. Plants belonging to the class of the Gymnospermae are Cycadales, Ginkgoales, Gnetales, and Pinales.

[0200] Suitable species may include members of the genus Abelmoschus, Abies, Acer, Agrostis, Allium, Alstroemeria, Ananas, Andrographis, Andropogon, Artemisia, Arundo, Atropa, Berberis, Beta, Bixa, Brassica, Calendula, Camellia, Camptotheca, Cannabis, Capsicum, Carthamus, Catharanthus, Cephalotaxus, Chrysanthemum, Cinchona, Citrullus, Coffea, Colchicum, Coleus, Cucumis, Cucurbita, Cynodon, Datura, Dianthus, Digitalis, Dioscorea, Elaeis, Ephedra, Erianthus, Erythroxylum, Eucalyptus, Festuca, Fragaria, Galanthus, Glycine, Gossypium, Helianthus, Hevea, Hordeum, Hyoscyamus, Jatropha, Lactuca, Linum, Lolium, Lupinus, Lycopersicon, Lycopodium, Manihot, Medicago, Mentha, Miscanthus, Musa, Nicotiana, Oryza, Panicum, Papaver, Parthenium, Pennisetum, Petunia, Phalaris, Phleum, Pinus, Poa, Poinsettia, Populus, Rauwolfia, Ricinus, Rosa, Saccharum, Salix, Sanguinaria, Scopolia, Secale, Solanum, Sorghum, Spartina, Spinacea, Tanacetum, Taxus, Theobroma, Triticosecale, Triticum, Uniola, Veratrum, Vinca, Vitis, and Zea.

[0201] The methods and compositions of the present invention are preferably used in plants that are important or interesting for agriculture, horticulture, biomass for the production of biofuel molecules and other chemicals, and/or forestry. Non-limiting examples include, for instance, Panicum virgatum (switchgrass), Sorghum bicolor (sorghum, sudangrass), Miscanthus giganteus (miscanthus), Saccharum sp. (energycane), Populus balsamifera (poplar), Zea mays (corn), Glycine max (soybean), Brassica napus (canola), Triticum aestivum (wheat), Gossypium hirsutum (cotton), Oryza sativa (rice), Helianthus annuus (sunflower), Medicago sativa (alfalfa), Beta vulgaris (sugarbeet), Pennisetum glaucum (pearl millet), Panicum spp., Sorghum spp., Miscanthus spp., Saccharum spp., Erianthus spp., Populus spp., Andropogon gerardii (big bluestem), Pennisetum purpureum (elephant grass), Phalaris arundinacea (reed canarygrass), Cynodon dactylon (bermudagrass), Festuca arundinacea (tall fescue), Spartina pectinata (prairie cord-grass), Arundo donax (giant reed), Secale cereale (rye), Salix spp. (willow), Eucalyptus spp. (eucalyptus), Triticosecale spp. (triticum—wheat X rye), Bamboo, Carthamus tinctorius (safflower), Jatropha curcas (Jatropha), Ricinus communis (castor), Elaeis guineensis (oil palm), Phoenix dactylifera (date palm), Archontophoenix cunninghamiana (king palm), Syagrus romanzoffiana (queen palm), Linum usitatissimum (flax), Brassica juncea, Manihot esculenta (cassaya), Lycopersicon esculentum (tomato), Lactuca saliva (lettuce), Musa paradisiaca (banana), Solanum tuberosum (potato), Brassica oleracea (broccoli, cauliflower, brusselsprouts), Camellia sinensis (tea), Fragaria ananassa (strawberry), Theobroma cacao (cocoa), Coffea arabica (coffee), Vitis vinifera (grape), Ananas comosus (pineapple), Capsicum annum (hot & sweet pepper), Allium cepa (onion), Cucumis melo (melon), Cucumis sativus (cucumber), Cucurbita maxima (squash), Cucurbita moschata (squash), Spinacea oleracea (spinach), Citrullus lanatus (watermelon), Abelmoschus esculentus (okra), Solanum melongena (eggplant), Papaver somniferum (opium poppy), Papaver orientale, Taxus baccata, Taxus brevifolia, Artemisia annua, Cannabis saliva, Camptotheca acuminate, Catharanthus roseus, Vinca rosea, Cinchona officinalis, Colchicum autumnale, Veratrum californica, Digitalis lanata, Digitalis purpurea, Dioscorea spp., Andrographis paniculata, Atropa belladonna, Datura stomonium, Berberis spp., Cephalotaxus spp., Ephedra sinica, Ephedra spp., Erythroxylum coca, Galanthus wornorii, Scopolia spp., Lycopodium serratum (Huperzia serrata), Lycopodium spp., Rauwolfia serpentine, Rauwolfia spp., Sanguinaria canadensis, Hyoscyamus spp., Calendula officinalis, Chrysanthemum parthenium, Coleus forskohlii, Tanacetum parthenium, Parthenium argentatum (guayule), Hevea spp. (rubber), Mentha spicata (mint), Mentha piperita (mint), Bixa orellana, Alstroemeria spp., Rosa spp. (rose), Dianthus caryophyllus (carnation), Petunia spp. (petunia), Poinsettia pulcherrima (poinsettia), Nicotiana tabacum (tobacco), Lupinus albus (lupin), Uniola paniculata (oats), bentgrass (Agrostis spp.), Populus tremuloides (aspen), Pinus spp. (pine), Abies spp. (fir), Acer spp. (maple), Hordeum vulgare (barley), Poa pratensis (bluegrass), Lolium spp. (ryegrass), Phleum pratense (timothy), and conifers. Of interest are plants grown for energy production, so called energy crops, such as cellulose-based energy crops like Panicum virgatum (switchgrass), Sorghum bicolor (sorghum, sudangrass), Miscanthus giganteus (miscanthus), Saccharum sp. (energycane), Populus balsamifera (poplar), Andropogon gerardii (big bluestem), Pennisetum purpureum (elephant grass), Phalaris arundinacea (reed canarygrass), Cynodon dactylon (bermudagrass), Festuca arundinacea (tall fescue), Spartina pectinata (prairie cord-grass), Medicago sativa (alfalfa), Arundo donax (giant reed), Secale cereale (rye), Salix spp. (willow), Eucalyptus spp. (eucalyptus), Triticosecale spp. (triticum—wheat X rye), and Bamboo; and starch-based energy crops like Zea mays (corn) and Manihot esculenta (cassava); and sucrose-based energy crops like Saccharum sp. (sugarcane) and Beta vulgaris (sugarbeet); and biofuel-producing energy crops like Glycine max (soybean), Brassica napus (canola), Helianthus annuus (sunflower), Carthamus tinctorius (safflower), Jatropha curcas (Jatropha), Ricinus communis (castor), Elaeis guineensis (African oil palm), Elaeis oleifera (American oil palm), Cocos nucifera (coconut), Camelina sativa (wild flax), Pongamia pinnata (Pongam), Olea europaea (olive), Linum usitatissimum (flax), Crambe abyssinica (Abyssinian-kale), and Brassica juncea.

### Use of the Molecules of the Invention in Making Recombinant Microbes:

[0202] General methods for employing microbial strains comprising a nucleic acid or polypeptide sequence according to the present invention, or a variant thereof, in pest control or in engineering other microorganisms as pesticidal agents are known in the art. See, for example U.S. Pat. Nos. 7,129,212; 7,056,888; 5,308,760; and 5,039,523.

[0203] For examples, the microbial strains, e.g. Bacillus species, containing a nucleic acid sequence of the present invention, or a variant thereof, or the microorganisms that have been genetically altered to contain a pesticidal gene sequence and protein may be used for protecting agricultural crops and products from pests. In one aspect of the invention, whole cells, i.e. unlysed cells, of a toxin (pesticide)-producing organism are treated with reagents that prolong the activity of the toxin produced in the cells when the cells are applied to the environment of target pest(s).

[0204] Alternatively, polypeptides having toxin-encoding sequences according to the present invention can be cloned and introduced in Pseudomonas spp., thus expressing the proteins and microencapsulating them in the bacterial cell wall. A variety of techniques suitable for production of bacterial toxins in Pseudomonas spp. are known in the art. Microencapsulated toxin could be used in spray applications alone or in rotations with B. thuringiensis-based insecticides containing other toxins.

[0205] Alternatively, a bio-pesticide can be produced by introducing a toxin-encoding sequence into a cellular host. Expression of the toxin gene results, directly or indirectly, in the intracellular production and maintenance of the bio-pesticide. In one aspect of this invention, these cells are then treated under conditions that prolong the activity of the toxin produced in the cell when the cell is applied to the environment of target pest(s). The resulting product retains the toxicity of the toxin. These naturally encapsulated pesticides may then be formulated in accordance with conventional techniques for application to the environment hosting a target pest, e.g., soil, water, and foliage of plants. See, for example U.S. Pat. No. 4,695,462; and the references cited therein. Alternatively, one may formulate the cells expressing a gene of this invention such as to allow application of the resulting material as a pesticide.

### Pesticidal Compositions

[0206] The polypeptides according to the present invention are normally applied in the form of compositions and can be applied to the crop area or plant to be treated, simultaneously or in succession, with other compounds and compositions. These compounds and compositions can be cryoprotectants, detergents, dormant oils, fertilizers, pesticidal soaps, polymers, surfactants, weed killers, and/or time-release or biodegradable carrier formulations that permit long-term dosing of a target area following a single application of the formulation. They can also be selective chemical bacteriocides, insecticides, herbicides, fungicides, microbicides, amoebicides, pesticides, nematocides, molluscicides, virucides, or mixtures of several of these preparations, if desired, together with further agriculturally acceptable carriers, surfactants or application-promoting adjuvants customarily employed in the art of formulation. Suitable carriers and adjuvants can be solid or liquid and correspond to the substances ordinarily employed in formulation technology, e.g. natural or regenerated mineral dispersants, substances, solvents, tackifiers, wetting agents, binders, or fertilizers. Likewise the formulations may be prepared into edible “baits” or fashioned into pest “traps” to permit feeding or ingestion by a target pest of the pesticidal formulation.

[0207] In some embodiments, methods of applying a pesticidal polypeptide or an agro-biochemical composition in accordance with the present invention, which contains at least one of the pesticidal polypeptides of the present invention, include leaf application, seed coating and soil application. The number of applications and the rate of application depend on the intensity of infestation by the corresponding pest.

[0208] The composition may be formulated as a powder, dust, pellet, granule, spray, emulsion, colloid, solution, or such like, and may be prepared by such conventional means as centrifugation, concentration, desiccation, extraction, filtration, homogenization, or sedimentation of a culture of cells comprising the polypeptide. In all such compositions that contain at least one such pesticidal polypeptide, the polypeptide may be present in a concentration of from about 1% to about 99% by weight.

[0209] Coleopteran, dipteran, lepidopteran, or nematode pests may be killed or reduced in numbers in a given area by the methods of the invention, or may be prophylactically applied to an environmental area to prevent infestation by a susceptible pest. Preferably the pest ingests, or is contacted with, a pesticidally-effective amount of the polypeptide. As disclosed above, a “pesticidally-effective amount” is intended as an amount of a pesticide or a pesticidal treatment which is necessary to obtain a reduction in the level of pest development and/or in the level of pest infection relative to that occurring in an untreated control. This amount will vary depending on such factors as, for example, the specific target pests to be controlled, the specific environment, location, plant, crop, or agricultural site to be treated, the environmental conditions, and the method, rate, concentration, stability, and quantity of application of the pesticidally-effective polypeptide composition. The formulations may also vary with respect to climatic conditions, environmental considerations, and/or frequency of application and/or severity of pest infestation.

[0210] The pesticidal compositions described herein may be made by formulating the microbial cell, spore suspension, bacterial crystal, or isolated protein component with the desired agriculturally-acceptable carrier. The compositions may be formulated prior to administration in an appropriate means such as lyophilized, freeze-dried, desiccated, or in an aqueous carrier, medium or suitable diluent, such as saline or other buffer. The formulated compositions may be in the form of a dust or granular material, or a suspension in oil (vegetable or mineral), or water or oil/water emulsions, or as a wettable powder, or in combination with any other carrier material suitable for agricultural application. Suitable agricultural carriers can be solid or liquid and are well known in the art. The term “agriculturally-acceptable carrier” covers all adjuvants, inert components, dispersants, surfactants, tackifiers, binders, etc. that are ordinarily used in pesticide formulation technology; these are well known to those skilled in pesticide formulation. The formulations may be mixed with one or more solid or liquid adjuvants and prepared by various means, e.g., by homogeneously mixing, blending and/or grinding the pesticidal composition with suitable adjuvants using conventional formulation techniques. Suitable formulations and application methods are described in, for example, U.S. Pat. Appl. No. US 20090087863A1.

[0211] The plants can also be treated with compositions of the invention that comprise one or more chemical compositions, including one or more herbicide, insecticides, or fungicides. Exemplary chemical compositions include herbicides (S-)Metolachlor, Alachlor, Amidosulfuron, Atrazine, Azimsulfuron, Beflubutamid, Bensulfuron, Bents zone, Benzobicyclon, Bispyribac, Bromacil, Bromoxynil, Butachlor, Butafenacil, Carfentrazone, Chloridazon, Chlorimuron-Ethyl, Chlorsulfuron, Clethodim, Clodinafop, Clopyralid, Cloransulam-Methyl, Cycloxydim, Cyhalofop, Daimuron, Desmedipham, Diclofop, Diflufenican, Diuron, Ethofumesate, Ethoxysulfuron, Fenoxaprop, Fentrazamide, Florasulam, Fluazifop, Fluazifop-butyl, Flucarbazone, Flufenacet, Flumioxazin, Fluometuron, Fluoroxypyr, Flupyrsulfuron, Fomesafen, Glufosinate, Glyphosate, Halosulfuron, Halosulfuron Gowan, Imazamox, Imazaquin, Imazethapyr, Imazosulfuron, Indanofan, Indaziflam, Iodosulfuron, Ioxynil, Isoproturon, Lenacil, Linuron, Mefenacet, Mesosulfuron, Mesotrione, Metamitron, Metazachlor, Metribuzin, Metsulfuron, MSMA, Nicosulfuron, Norflurazon, Oxadiargyl, Oxadiazone, Oxaziclomefone, Oxidemethon-methyl, Oxyfluorfen, Paraquat, Pendimethalin, Penoxsulam, Phenmedipham, Phenoxies, Picolinafen, Pinoxaden, Pirimicarb, Pretilachlor, Primisulfuron, Prometryn, Propanil, Propoxycarbazone, Propyzamide, Pyrasulfotole, Pyrazosulfuron, Pyributicarb, Pyriftalid, Pyrimisulfan, Pyrithiobac-sodium, Pyroxasulfon, Pyroxsulam, Quinclorac, Quinmerac, Quizalofop, Rimsulfuron, Saflufenacil, Sethoxydim, Simazine, Sulcotrione, Sulfosulfuron, Tefuryltrione, Tembotrione, Tepraloxydim, Thiacloprid, Thiamethoxam, Thidiazuron, Thiencarbazone, Thifensulfuron, Thiobencarb, Topramezone, Tralkoxydim, Triallate, Triasulfuron, Tribenuron, Trifloxysulfuron, Trifluralin, Trifluralin Ethametsulfuron, Triflusulfuron; Insecticides: (S-)Dimethenamid, (S-)Metolachlor, 4-[[(6-Chlorpyridin-3-yl)methyl](2,2-difluorethyl)amino]furan-2(5H)-on, Abamectin, Acephate, Acequinocyl, Acetamiprid, Acetochlor, Alachlor, Aldicarb, alpha-Cypermethrin, Avermectin, Bacillus thuriengiensis, Benfuracarb, beta-cyfluthrin, Bifenazate, Bifenthrin, Bromoxynil, Buprofezin, Cadusaphos, Carbaryl, Carbofuran, Cartap, Chlorpyrifos, Chlorpyriphos, Chromafenozide, Clopyralid, Clorphyriphos, Clothianidin, Cyanopyrafen, Cyaxypyr, Cyazypyr, Cyflumetofen, Cyfluthrin/beta-cyfluthrin, Cypermethrin, Deltamethrin, Diazinon, Dicamba, Dimethoate, Dinetofuran, Dinotefuran, Emamectin-benzoate, Endosulfan, Esfenvalerate, Ethiprole, Etofenprox, Fenamiphos, Fenbutatin-oxid, Fenitrothion, Fenobucarb, Fipronil, Flonicamid, Fluacrypyrim, Flubendiamide, Flufenacet, Foramsulfuron, Forthiazate, gamma and lambda Cyhalothrin, gamma Cyhalothrin, gamma/lambda Cyhalothrin, Gamma-cyhalothrin, Glufosinate, Glyphosate, Hexthiazox, Imidacloprid, Indoxacarb, Isoprocarb, Isoxaflutole, Lambda-cyhalothrin, Lambda-cyhalthrin, Lufenuron, Malathion, Mesotrione, Metaflumizone, Metamidophos, Methamidophos, Methiocarb, Methomyl, Methoxyfenozide, Monocrotophos, Novaluron, Organophosphates, Parathion, Profenophos, Pyrethroids, Pyridalyl, Pyriproxifen, Rynaxypyr, Spinodiclofen, Spinosad, Spinoteram, Spinotoram, Spirodiclofen, Spiromesifen, Spirotetramat, Sulfoxaflor, tau-Fluvaleriate, Tebupirimphos, Tefluthrin, Terbufos, Thiacloprid, Thiamethoxam, Thiocarb, Thiodicarb, Thriazophos, Tolfenpyrad, Triazophos, Triflumoron; Fungicides: Azoxystrobin, Boscalid, Carbendazim, Carpropamid, Chlorothalonil, Cyazofamid, Cyflufenamid, Cymoxanil, Cyproconazole, Cyprodinil, Diclocymet, Dimoxystrobin, EBDCs, Edifenphos, Epoxiconazole, Ethaboxam, Etridiazole, Fenamidone, Fenhexamid, Fenitropan, Fenoxanil, Fenpropimorph, Ferimzone, Fluazinam, Fludioxonil, Fluoxastrobin, Flutriafol, Fosetyl, Iprobenfos, Iprodione, Iprovalicarb, Isoprothiolane, Kresoxim-methyl, Metalaxyl, Metalaxyl/mefenoxam, Oxpoconazole fumarate, Pencycuron, Picoxystrobin, Probenazole, Prochloraz, Prothioconazole, Pyraclostrobin, Pyroquilon, Quinoxyfen, Quintozene, Simeconazole, Sulphur, Tebuconazole, Tetraconazole, Thiophanate-methyl, Thiram, Tiadinil, Tricyclazole, Trifloxystrobin, Vinclozolin, Zoxamide.

[0212] The pesticidal compositions of the present invention may be used in controlling one or more agronomically important pests including, but is not limited to, bacteria, fungi, insects, mites, nematodes, ticks, and the like. Insect pests include insects selected from the orders Anoplura, Coleoptera, Dermaptera, Diptera, Hemiptera, Homoptera, Hymenoptera, Isoptera, Lepidoptera, Mallophaga, Orthroptera, Siphonaptera, Thysanoptera, Trichoptera, etc., particularly Coleoptera, Diptera, and Lepidoptera.

[0213] Nematode pests of particular interest include parasitic nematodes such as root-knot, cyst, and lesion nematodes, including Heterodera spp., Globodera spp., and Meloidogyne spp.; particularly members of the cyst nematodes, including, but not limited to, Heterodera avenae (cereal cyst nematode); Heterodera glycines (soybean cyst nematode); Heterodera schachtii (beet cyst nematode); and Globodera pailida and Globodera rostochiensis (potato cyst nematodes). Lesion nematodes include Pratylenchus spp.

[0214] The pesticidal compositions of the present invention are preferably used in controlling insect pests of the major crops including, but not limited, Aceria tulipae, wheat curl mite; Acrosternum hilare, green stink bug; Agromyza parvicornis, corn blot leafminer; Agrotis ipsilon, black cutworm; Agrotis orthogonia, western cutworm; Anaphothrips obscrurus, grass thrips; Anthonomus grandis, boll weevil; Anticarsia gemmatalis, velvetbean caterpillar; Anuraphis maidiradicis, corn root aphid; Aphis gossypii, cotton aphid; Blissus leucopterus leucopterus, chinch bug; Bothyrus gibbosus, carrot beetle; Brevicoryne brassicae, cabbage aphid; Cephus cinctus, wheat stem sawfly; Chaetocnema pulicaria, corn flea beetle; Chilo partellus, sorghum borer; Colaspis brunnea, grape colaspis; Contarinia sorghicola, sorghum midge; corn leaf aphid; Cyclocephala borealis, northern masked chafer (white grub); Cyclocephala immaculata, southern masked chafer (white grub); Delia platura, seedcorn maggot; Delia ssp., Root maggots; Diabrotica longicornis barberi, northern corn rootworm; Diabrotica undecimpunctata howardi, southern corn rootworm; Diabrotica virgifera, western corn rootworm; Diatraea grandiosella, southwestern corn borer; Diatraea saccharalis, sugarcane borer; Diatraea saccharalis, surgarcane borer; Elasmopalpus lignosellus, lesser cornstalk borer; Eleodes, Conoderus, and Aeolus spp., wireworms; Empoasca fabae, potato leafhopper; Epilachna varivestis, Mexican bean beetle; Euschistus servus, brown stink bug; Feltia subterranea, granulate cutworm; Franklinkiella fusca, tobacco thrips; Helicoverpa zea, corn earworm; Helicoverpa zea, cotton bollworm; Heliothis virescens, cotton budworm; Homoeosoma electellum, sunflower moth; Hylemya coarctate, wheat bulb fly; Hylemya platura, seedcorn maggot; Hypera punctata, clover leaf weevil; Lissorhoptrus oryzophilus, rice water weevil; Lygus lineolaris, tarnished plant bug; Macrosiphum avenae, English grain aphid; Mamestra configurata, Bertha armyworm; Mayetiola destructor, Hessian fly; Melanoplus differentialis, differential grasshopper; Melanoplus femurrubrum, redlegged grasshopper; Melanoplus sanguinipes, migratory grasshopper; Melanotus spp., wireworms; Meromyza americana, wheat stem maggot; Myzus persicae, green peach aphid; Neolasioptera murtfeldtiana, sunflower seed midge; Nephotettix nigropictus, rice leafhopper; Ostrinia nubilalis, European corn borer; Oulema melanopus, cereal leaf beetle; Pectinophora gossypiella, pink bollworm; Petrobia latens, brown wheat mite; Phyllophaga crinita, white grub; Phyllotreta cruciferae, Flea beetle; Plathypena scabs, green cloverworm; Plutella xylostella, Diamond-back moth; Popillia japonica, Japanese beetle; Pseudaletia unipunctata, army worm; Pseudatomoscelis seriatus, cotton fleahopper; Pseudoplusia includens, soybean looper; Rhopalosiphum maidis; corn leaf aphid; Russian wheat aphid; Schizaphis graminum, greenbug; Sericothrips variabilis, soybean thrips; Sipha flava, yellow sugarcane aphid; Sitodiplosis mosellana, wheat midge; Sitophilus oryzae, rice weevil; Solenopsis milesta, thief ant; Sphenophorus maidis, maize billbug; Spodoptera exigua, beet armyworm; Spodoptera frugiperda, fall armyworm; Suleima helianthana, sunflower bud moth; Tetranychus cinnabarinus, carmine spider mite; Tetranychus turkestani, strawberry spider mite; Tetranychus urticae, twospotted spider mite; Thrips tabaci, onion thrips; Trialeurodes abutilonea, bandedwinged whitefly; Zygogramma exclamationis, sunflower beetle.

[0215] Throughout this disclosure, various information sources are referred to and incorporated by reference. The information sources include, for example, scientific journal articles, patent documents, textbooks, and World Wide Web browser-inactive page addresses. The reference to such information sources is solely for the purpose of providing an indication of the general state of the art at the time of filing. While the contents and teachings of each and every one of the information sources can be relied on and used by one of skill in the art to make and use embodiments of the invention, any discussion and comment in a specific information source should in no way be considered as an admission that such comment was widely accepted as the general opinion in the field.

[0216] The discussion of the general methods given herein is intended for illustrative purposes only. Other alternative methods and embodiments will be apparent to those of skill in the art upon review of this disclosure, and are to be included within the spirit and purview of this application.

[0217] It should also be understood that the following examples are offered to illustrate, but not limit, the invention.

### EXAMPLES

### Example 1

### Isolation of Microorganisms

[0218] First Isolation:

[0219] Microbial samples were collected from several sampling locations in the United States. Composite microbial samples for each sampling location were created from individual rhizosphere samples. Composites were created by taking 2 grams of rhizosphere soil from each individual sample and combining them in 50 mL Falcon tubes. Soils were homogenized after composites.

[0220] Composite microbial samples were subsequently used in a Bt enrichment procedure that involved growing the samples on a R&F® chromogenic plating medium containing a chromogenic substrate and inhibitory ingredients to inhibit growth of other bacteria, yeast and mold. This plating medium is routinely used to simultaneously identifying Bacillus cereus and B. thuringiensis cells from a mixed sample (Catalogue No. M-0400, R&F Products). This highly selective medium typically can help identify only B. cereus and B. thuringiensis isolates as blue colonies, while other Bacillus species either form white colonies or do not grow. Blue colonies, i.e. B. cereus and B. thuringiensis, were individually picked into 96-well cell culture plates containing 150 μL/well of 2YT medium and incubated at 30° C. overnight. These isolation plates were pin-tooled to create 2 new 96-well plates (replicates) and archived with 20% glycerol at −80° C.

[0221] Second Isolation:

[0222] 1 gram of composite soil was placed into 10 mL LB medium supplemented with 0.25M sodium acetate and incubated at 30° C. on a shaker for 4 hours. Subsequently, these incubations were serially diluted or directly plated onto R&F® chromogenic plating medium, followed by incubation at 30° C. for 24 hours. Blue colonies, i.e. B. cereus and B. thuringiensis, were selected, incubated and archived as described above.

[0223] An initial 96-well plate containing Bt enrichment isolates was submitted to confirm the identity of the isolates via 16S rRNA sequencing. As described in details below, this initial 16S sequencing was done to validate enrichment and isolation methods and verify that the isolates recovered were Bacillus sp.

Bacterial Cell Lysis and Acquiring 16S rRNA Sequence Information

[0224] A 20 μL aliquot of cell suspension was transferred to a 96-well PCR plate containing 20 μl of a 2× lysis buffer (100 mM Tris HCL, pH 8.0, 2 mM EDTA, pH 8.0, 1% SDS, 400 μg/ml Proteinase K). Lysis conditions were as follows: 55° C. for 30 minutes, 94° C. for 4 minutes. An aliquot of the lysis product was used as the source of template DNA for PCR amplification. The 16S rRNA sequence was amplified via PCR using M13-27F (SEQ ID NO: 207) and 1492R M13-tailed (SEQ ID NO: 208) primers.

[0225] For amplification of 16S rRNA region, each PCR mixture was prepared in a 20 final volume reaction containing 4 μl from the bacterial lysis reaction, 2 uM of each primer (27F or 1492R), 6% Tween-20, and 10 μl of 2× ImmoMix (Bioline USA Inc, Taunton, Mass.). PCR conditions were as follows: 94° C. for 10 minutes; 94° C. for 30 seconds, 52° C. for 30 seconds, 72° C. for 75 seconds for 30 cycles; 72° C. for 10 minutes. A 2-p. 1 aliquot of the PCR product was run on a 1.0% agarose gel to confirm a single band of the expected size. Positive bands were purified and submitted for PCR sequencing. Sequencing was performed in the forward and reverse priming directions by the J. Craig Venter Institute in San Diego, Calif. using 454 technologies.

[0226] Homology searching for the determined nucleotide sequence was conducted using the DDBJ/GenBank/EMBL database. Sequence identity and similarity were also determined using GenomeQuest™ software (Gene-IT, Worcester Mass. USA). The sequence analysis results revealed that of the 92 Bt enrichment isolates, 91 isolates have an 16S rRNA gene sharing at least 98% sequence identity to that of B. cereus and/or B. thuringiensis strains previously identified. These results confirmed that the intended Bacillus cell populations were recovered from the selection step on R&F® chromogenic plating medium. Based on the observation that a large majority of blue colonies grown on R&F® chromogenic plating medium were indeed B. cereus and/or B. thuringiensis, 16S sequencing step can be made an optional step in subsequent selections of B. cereus and/or B. thuringiensis isolates.

[0227] Whenever phylogenetic reconstruction was needed, nucleotide sequences were aligned in Bioedit (located on the World Wide Web at www.mbio.ncsu.edu/bioedit/bioedit.html) followed by manual refinement. Phylogenetic trees were constructed in PHYML (located on the World Wide Web at pbil.univ-lyonl.fr/software/phyml_multi/) using maximum likelihood, HKY substitution model and the default settings. Branch support was obtained by bootstrapping (100 replicates).

### Example 2

### Purification of Extrachromosomal DNA from Mixed Populations of Microbial Isolates

[0228] An improved procedure for bacterial cell lysis was developed and optimized as follows.

[0229] A subset of Bt enrichment isolates were selected to verify the efficacy of cell lysis and the extrachromosomal DNA extraction method. Preparation of extrachromosomal DNA from the Bt enriched isolates was performed by essentially following a procedure described in Andrup et al. (Plasmid 59:139-143, 2008), with some modifications. For each isolate, a 7 mL 2×YT culture was inoculated with 50 μl, pre-culture, followed by an overnight incubation (12-16 hours) at 30° C. on a rotary shaker (200 rpm). Cells were pelleted at 3250×g for 30 minutes at 4° C., and resuspended in 100 μL, of extraction buffer (15% [wt/vol] sucrose, 40 mM Tris, 2 mM EDTA, pH7.9) by gently pipetteting the cell suspension up and down a few times. Cells were lysed by addition of 200 μL of lysing solution (3% [wt/vol] SDS, 50 mM Tris, pH 12.5). The lysate was heated at 60° C. for 30 minutes followed by the addition of 20 μL of Proteinase K (20 mg/mL, Finnzymes, Thermo Scientifics). The solution was mixed by inversion several times and incubated at 37° C. for 60 minutes. One milliliter of phenol-chloroform-isoamyl alcohol (25:24:1) was added, and the solution was inverted several times. After centrifugation 8000×g for 7 minutes, each extraction typically yielded ˜250 μl, of upper aqueous layer, which was transferred to a new tube. A 10 μL aliquot of the aqueous solution was subjected to electrophoresis to approximate the quantity of extrachromosomal DNA and contaminant genomic DNA, if any. Contaminant RNAs, which could generally interfere with subsequent pulsed-field gel electrophoresis (PFGE) step, was removed by the addition of 1 μL (10 mg/mL) of RNase (Fermentas). Pulsed-field gel electrophoresis (PFGE) was used to separate high-molecular weight nucleic acids. Approximately 40 μL of the aqueous solution from the DNA extraction step was mixed with 20 μL of melted agarose before being loaded into each well of a 1% agarose gel. The gel was run for 16 hours in 0.96×TAE buffer. Gel conditions were as follows: initial switch time was 5 seconds; final switch time was 20 seconds; 6 volts/cm, 120° angle, 300-350 mA during run. Standards were Epigene Bac tracker, Lambda midrange, and Lamba ladder (New England Biolabs). The gel was post-stained with ethidium bromide (1 μg/mL) and visualized under UV illumination. Visualization confirmed that isolates possessed extrachromosomal DNA, many with sizes greater than 100 kb.

[0230] Preparation of Extrachromosomal DNA Using QIAGEN® Reagents.

[0231] QIAGEN's large construct kit was used to extract extrachromosomal DNA from Bt isolates in attempts to remove genomic DNA from extrachromosomal DNA. Two approaches were attempted; (1) the QIAGEN® protocol was followed as recommended by manufacturer, (2) a modified cell lysis procedure was deployed to aid in lysing the Gram-positive Bacillus cells (because the original QIAGEN® protocol was developed for E. coli, a Gram negative bacterium).

[0232] Protocol 1: QIAGEN® protocol was followed as recommended. Incubation step (step 5 of QIAGEN® protocol) was 5 minutes at room temperature, followed by 1.5 hours on ice prior to neutralization step.

[0233] Protocol 2: Step 5 of QIAGEN® protocol was modified to be more rigorous for lysing Bacillus cells. This included a 30-minute incubation at 60° C. in a water bath and a 60 minute incubation at 37° C., with the addition of 250 μg/mL proteinase K.

[0234] Two hundred Bt enrichment isolates were grown individually in 5 mL Miller's LB each for 16 hours at 30° C. on a rotary shaker (200 rpm). Following incubation, individual cultures were combined to create a 1 L composite culture. 500 mL of this composite culture was pelleted and resuspended following the QIAGEN® large construct protocol. The modified lysis procedure for Bacillus cells was used in place of the recommended QIAGEN® step 5. The remaining steps were followed as recommended by the manufacturer.

[0235] Following extraction, final pellet from 2^{nd} ethanol precipitation step (QIAGEN® step 19) was resuspended in 500 μL of TE buffer (pH 8.5) and quantified fluorometrically via a Qubit® fluorometer (Invitrogen). 10 μL of each extraction were run on a 1.0% agarose gel. Visual assessment of the gel results revealed that the extrachromosomal DNA extracted using the improved procedure (i.e. Protocol 2) was presented on the gel as sheared DNA ranging in size from 0.5 to 30-Kb. By contrast, a control extraction that was performed following the exact recommendation of manufacturer (i.e. Protocol 1) yielded no DNA.

### Example 3

### Metagenomic Sequence Dataset Buildup: High-Throughput Sequencing, Sequence Assembly and Annotation

[0236] A pool of extrachromosomal nucleic acids purified from 200 Bacillus sp. isolates was shot-gun sequenced, assembled and annotated by using procedures described in PCT Patent Publication No. WO2010115156A2. The DNA template was subjected to a single lane of an Illumina Genome Analyzer IIx (GAIIx) platform according to the manufacturer's recommended conditions. Approximately 2 Gbp of 75 by paired-end reads were generated. The average insert size was ˜200 bp. Sequence assembly was then carried out using CLC Genomics Workbench de-novo assembler (CLC Bio), using default parameters. A total of 28,098 contigs with a total length of 18.3 Mbp and an N50 value of 702 by was assembled.

[0237] In a parallel sequencing experiment, the DNA template was also subjected to a single lane of an Illumina HiSeq 2000 Sequencing system, generating approximately 15 Gbp of 75 by paired-end reads with an average insert size of 200 bp. Sequence assembly was then carried out using CLC Genomics Workbench de-novo assembler (CLC Bio), using default parameters. A total of 47,551 contigs with a total length of 35.9 Mbp and an N50 value of 873 by was assembled.

[0238] The quality of the sequence data was significantly improved between the 2 data sets, with the HiSeq data providing greater coverage and generating more full-length sequences.

[0239] The remaining contigs of approximately 35 Mbp, i.e. the assembled contigs that did not show significant sequence similarity with the Bt toxin database and presumably represent other parts of the extrachromosomal DNA content, was also run through the prokaryotic annotation pipeline as described below.

[0240] Coding gene sequences were predicted from assembled contigs using an approach that combined evidence from multiple sources using the Evigan consensus gene prediction method as described previously by Liu et al. [Bioinformatics, March 1; 24(5):597-605, 2008]. All candidate ORFs on a metagenomic sequence read were first predicted based on stop codons found on all six frames and allowing for run-on in order to include partial ORFs. Candidate ORF translations were then annotated using Blastp searches against the NCBI non-redundant protein database and FastHMM (at microbesonline.org/fasthmm/) searches against Pfam (Finn et al., Nucleic Acids Res. 2008) and Superfamily (see, e.g., Inskeep et al., PLoS, 2010) domain databases. De novo ORF predictions were also made using 3 prokaryotic gene finding tools: Glimmer [Delcher et al., Bioinformatics, March 15; 23(6):673-9, 2007], Prodigal (at compbio.oml.gov/prodigal/), and Metagene [Brunet et al., Proc Natl Acad Sci USA, March 23; 101(12):4164-9, 2004]. The evidence from the blast/FastHMM searches and de novo gene finders was then combined in an unsupervised manner using Evigan. Since the start sites predicted by Evigan do not necessarily correspond to start codons, the predicted ORFs were extended upstream to the closest start codon in the same coding frame. The consensus gene prediction was performed by first binning contigs based on GC content and then running Evigan on each 10,000 contig bin separately.

### Example 4

### Use of Metagenomic Sequence Dataset to Rapidly Identify Novel Toxin Genes

[0241] Contigs resulting from the assembly and annotation process as described in Example 3 were then tested for presence of polynucleotide sequences encoding novel endotoxins by comparing the sequences against a database consisting of known endotoxins using the BLASTX algorithm. The analysis of the assembled and annotated sequences identified several genes belonging to many major classes of Bt toxins including Cry, VIP and Cyt genes. In total, 47 full-length and 56 partial novel toxin genes were identified along with many toxin genes previously discovered.

TABLE 1
Biotoxin-encoding sequences identified by the method of the invention.
Sequence identity was determined for each of the amino acid sequences using GenomeQuest ™
software with default settings. Exemplary functional homologs of each of the polypeptides are
provided. Other known homologs of the respective sequences are also provided in the
accompanying Sequence Listing.

| | | | | | Polynucleotide | Polypeptide |
|---|---|---|---|---|---|---|
| Gene ID | Length | Exemplary homologs | % identity | Toxin class | SEQ ID | SEQ ID |
| SG1METG47190 | Partial | GI: 229100569, C2VLX5 | 62.00 | Cry | 1 | 2 |
| SG1METG47191 | Partial | GI: 228911986, C3IBA6 | 66.00 | Cry | 3 | 4 |
| SG1METG47195 | Full-length | US20110263488 (SEQ ID | 81.03 | Cry | 5 | 6 |
| | | NO: 0004), US20080070829 | | | | |
| | | (SEQ ID NO: 0004) | | | | |
| SG1METG47207 | Partial | WO2011014749 (SEQ ID | 84.55 | Cry | 7 | 8 |
| | | NO: 0043) | | | | |
| SG1METG47218 | Partial | WO2010099365 (SEQ ID | 57.04 | Cry | 9 | 10 |
| | | NO: 0023, WO2010099365 | | | | |
| | | (SEQ ID NO: 0109), | | | | |
| | | WO2010099365 (SEQ ID | | | | |
| | | NO: 0110) | | | | |
| SG1METG47229 | Partial | U.S. Pat. No. 7,378,499 (SEQ ID | 45.36 | Cry | 11 | 12 |
| | | NO: 0044), U.S. Pat. No. 7,378,499 (SEQ | | | | |
| | | ID NO: 0050), WO2004003148 | | | | |
| | | (SEQ ID NO: 0050) | | | | |
| SG1METG47230 | Partial | YP_001642495, A9VV88, | 87.93 | Cry | 13 | 14 |
| | | ABY46520 | | | | |
| SG1METG47239 | Partial | GI: 228911387, C3I9T3 | 100.00 | Cry | 15 | 16 |
| SG1METG47244 | Partial | U.S. Pat. No. 7,452,700 (SEQ ID | 61.82 | Cry | 17 | 18 |
| | | NO: 0002), U.S. Pat. No. 7,329,736 (SEQ | | | | |
| | | ID NO: 0002) | | | | |
| SG1METG47245 | Partial | GI: 229100569, C2VLX5 | 62.00 | Cry | 19 | 20 |
| SG1METG47248 | Partial | WO2010099365 (SEQ ID | 77.53 | Cry | 21 | 22 |
| | | NO: 0072) | | | | |
| SG1METG47249 | Partial | ABY4652 | 91.98 | Cry | 23 | 24 |
| SG1METG47256 | Partial | GI: 48727548, A9UJY9 | 36.00 | Cry | 25 | 26 |
| SG1METG47260 | Partial | WO2010102172 (SEQ ID | 69.79 | Cry | 27 | 28 |
| | | NO: 0014) | | | | |
| SG1METG47261 | Partial | AZV31886, CN102417538 | 85.19 | Cry | 29 | 30 |
| | | (SEQ ID NO: 0001), | | | | |
| | | CN102417538 (SEQ ID | | | | |
| | | NO: 0002) | | | | |
| SG1METG47263 | Full-length | GI: 51090236, Q6BE06 | 50.00 | Cry | 31 | 32 |
| SG1METG47265 | Partial | JP2011526150 (SEQ ID | 53.57 | Cry | 33 | 34 |
| | | NO: 0197, JP2011526150 (SEQ | | | | |
| | | ID NO: 0198), WO2009158470 | | | | |
| | | (SEQ ID NO: 0268) | | | | |
| SG1METG47269 | Full-length | ZP_04069196, Q8KNU9. | 100.00 | Cyt | 35 | 36 |
| | | AOG39339 | | | | |
| SG1METG47272 | Partial | C3IW20, ZP_04069274, | 100.00 | Cry | 37 | 38 |
| SG1METG47321 | Partial | AXU72358, WO2009158470 | 70.01 | Cry | 39 | 40 |
| | | (SEQ ID NO: 0069) | | | | |
| SG1METG47324 | Full-length | US20100298207 (SEQ ID | 88.14 | Vip | 41 | 42 |
| | | NO: 0071) | | | | |
| SG1METG47325 | Full-length | WO2010099365 (SEQ ID | 75.91 | Vip | 43 | 44 |
| | | NO: 0070) | | | | |
| SG1METG47331 | Partial | GI: 51090239, Q6BE04 | 60.00 | Cry | 45 | 46 |
| SG1METG47332 | Full-length | GI: 17385650, Q8VUK9 | 39.00 | Cry | 47 | 48 |
| SG1METG47362 | Partial | GI: 228911944, C3IB67 | 100.00 | Cry | 49 | 50 |
| SG1METG47247 | Full-length | GI: 8928022, Q45729 | 36.00 | Cry | 51 | 52 |
| SG1METG47215 | Full-length | GI: 228937010, C3GC23 | 41.00 | Clostridium/ | 53 | 54 |
| | | | | epsilon toxin | | |
| SG1METG192243 | Partial | GI: 228918263, C3HSG6 | 64.00 | Clostridium/ | 55 | 56 |
| | | | | epsilon toxin | | |
| SG1METG186283 | Full-length | US20060191034 (SEQ ID | 81.04 | Clostridium/ | 57 | 58 |
| | | NO: 0006) | | epsilon toxin | | |
| SG1METG185109 | Partial | gi228918255, C3HSF9 | 34.00 | Clostridium/ | 59 | 60 |
| | | | | epsilon toxin | | |
| SG1METG203806 | Full-length | gi228918255, C3HSF9 | 34.00 | Clostridium/ | 61 | 62 |
| | | | | epsilon toxin | | |
| SG1METG215010 | Full-length | gi228918255, C3HSF9 | 31.00 | Clostridium/ | 63 | 64 |
| | | | | epsilon toxin | | |
| SG1METG217783 | Full-length | GI: 228949431, C3FB42 | 59.00 | Clostridium/ | 65 | 66 |
| | | | | epsilon toxin | | |
| SG1METG47259 | Partial | AEM22374 | 98.92 | Cry | 67 | 68 |
| SG1METG47235 | Partial | US20100017914 (SEQ ID | 99.88 | Cry | 69 | 70 |
| | | NO: 0078) | | | | |
| SG1METG47198 | Partial | AAP94035, WO2007147096 | 99.66 | Cry | 71 | 72 |
| | | (SEQ ID NO: 0004) | | | | |
| SG1METG47359 | Partial | Q2HWE8, BAE79727 | 100.00 | Cry | 73 | 74 |
| SG1METG47296 | Full-length | C3IVB1 | 100.00 | Cry | 75 | 76 |
| SG1METG47286 | Partial | AAX20050, CAD30095 | 100.00 | Cry | 77 | 78 |
| SG1METG47287 | Full-length | ZP_04069644, Q7AL73, | 100.00 | Cyt | 79 | 80 |
| | | AXW72396 | | | | |
| SG1METG47231 | Full-length | ZP_04069272, Q29Y56, | 100.00 | Cyt | 81 | 82 |
| | | Q7AL78 | | | | |
| SG1METG47319 | Full-length | ZP_04069020, Q3F161, | 100.00 | Cry | 83 | 84 |
| | | ZP_00738423 | | | | |
| SG1METG47320 | Full-length | ZP_04069019, Q3F160, | 100.00 | Cry | 85 | 86 |
| | | ZP_00738424 | | | | |
| AGRMET1T167125 | Partial | US20110263488 (SEQ ID | 74.65 | Cry | 87 | 88 |
| | | NO: 0004), US20080070829 | | | | |
| | | (SEQ ID NO: 0004), | | | | |
| | | AOG39300 | | | | |
| AGRMET1T140198 | Partial | AZE84673, WO2011014749 | 84.76 | Cry | 89 | 90 |
| | | (SEQ ID NO: 0043) | | | | |
| AGRMET1T166163 | Partial | AZE84673, WO2011014749 | 79.17 | Cry | 91 | 92 |
| | | (SEQ ID NO: 0043) | | | | |
| AGRMET1T218423 | Full-length | WO2007027776 (SEQ ID | 34.67 | Cry | 93 | 94 |
| | | NO: 0001), WO2007027776 | | | | |
| | | (SEQ ID NO: 0007), | | | | |
| | | WO2007027776 (SEQ ID | | | | |
| | | NO: 0009) | | | | |
| AGRMET1T218946 | Full-length | U.S. Pat. No. 7,572,587 (SEQ ID | 36.18 | Cyt | 95 | 96 |
| | | NO: 0001), U.S. Pat. No. 7,186,893 (SEQ | | | | |
| | | ID NO: 0001) | | | | |
| AGRMET1T218535 | Full-length | KR1019997002628 (SEQ ID | 30.96 | Cyt | 97 | 98 |
| | | NO: 0001), WO2007027776 | | | | |
| | | (SEQ ID NO: 0001), | | | | |
| | | WO2007027776 (SEQ ID | | | | |
| | | NO: 0007) | | | | |
| AGRMET1T581825 | Full-length | WO2005019414 (SEQ ID | 31.74 | Clostridium/ | 99 | 100 |
| | | NO: 0032, ABV98376, | | epsilon toxin | | |
| | | ABW00161 | | | | |
| AGRMET1T218655 | Full-length | WO2010099365 (SEQ ID | 56.79 | Clostridium/ | 101 | 102 |
| | | NO: 0029), WO2010099365 | | epsilon toxin | | |
| | | (SEQ ID NO: 0181), | | | | |
| | | WO2010099365 (SEQ ID | | | | |
| | | NO: 0182) | | | | |
| AGRMET1T594567 | Partial | AET40693, AY858558, | 23.50 | Clostridium/ | 103 | 104 |
| | | AB444205 | | epsilon toxin | | |
| AGRMET1T218847 | Full-length | BAG28156, ADJ41718, | 20.42 | Clostridium/ | 105 | 106 |
| | | ACZ07215 | | epsilon toxin | | |
| AGRMET1T655671 | Full-length | US20120066793 (SEQ ID | 95.27 | Clostridium/ | 107 | 108 |
| | | NO: 0009) | | epsilon toxin | | |
| AGRMET1T587003 | Full-length | WO2011014749 (SEQ ID | 44.57 | Clostridium/ | 109 | 110 |
| | | NO: 0008), US20110030096 | | epsilon toxin | | |
| | | (SEQ ID NO: 0008) | | | | |
| AGRMET1T218951 | Full-length | CP001748, CP002093, | 26.67 | Clostridium/ | 111 | 112 |
| | | CP001597 | | epsilon toxin | | |
| AGRMET1T218961 | Full-length | CP001748, CP002093, | 24.78 | Clostridium/ | 113 | 114 |
| | | CP001597 | | epsilon toxin | | |
| AGRMET1T619806 | Partial | WO2011014749 (SEQ ID | 38.61 | Clostridium/ | 115 | 116 |
| | | NO: 0009), US20110030096 | | epsilon toxin | | |
| | | (SEQ ID NO: 0009) | | | | |
| AGRMET1T616666 | Full-length | WO2011125015 (SEQ ID | 22.98 | Clostridium/ | 117 | 118 |
| | | NO: 9708), WO2011004263 | | epsilon toxin | | |
| | | (SEQ ID NO: 0032), | | | | |
| | | WO2011080595 (SEQ ID | | | | |
| | | NO: 0014) | | | | |
| AGRMET1T627497 | Full-length | U.S. Pat. No. 8,114,976 (SEQ ID | 21.23 | Clostridium/ | 119 | 120 |
| | | NO: 0740), WO2006044045 | | epsilon toxin | | |
| | | (SEQ ID NO: 0740) | | | | |
| AGRMET1T637067 | Full-length | ACA38725, AY858558, | 23.05 | Clostridium/ | 121 | 122 |
| | | AB444205 | | epsilon toxin | | |
| AGRMET1T143415 | Partial | WO2011014749 (SEQ ID | 28.16 | Clostridium/ | 123 | 124 |
| | | NO: 0026), US20110030096 | | epsilon toxin | | |
| | | (SEQ ID NO: 0026) | | | | |
| AGRMET1T218713 | Full-length | ABY46496 | 60.57 | Vip | 125 | 126 |
| AGRMET1T218461 | Full-length | ABY46496 | 49.73 | Vip | 127 | 128 |
| AGRMET1T218332 | Full-length | WO2010099365 (SEQ ID | 45.36 | Vip | 129 | 130 |
| | | NO: 0024), WO2010099365 | | | | |
| | | (SEQ ID NO: 0121), | | | | |
| | | WO2010099365 (SEQ ID | | | | |
| | | NO: 0122) | | | | |
| AGRMET1T218708 | Partial | WO2010099365 (SEQ ID | 48.21 | Vip | 131 | 132 |
| | | NO: 0024, WO2010099365 | | | | |
| | | (SEQ ID NO: 0121, | | | | |
| | | WO2010099365 (SEQ ID | | | | |
| | | NO: 0122 | | | | |
| AGRMET1T219045 | Full-length | WO2010099365 (SEQ ID | 42.01 | Vip | 133 | 134 |
| | | NO: 0024), WO2010099365 | | | | |
| | | (SEQ ID NO: 0121), | | | | |
| | | WO2010099365 (SEQ ID | | | | |
| | | NO: 0122) | | | | |
| AGRMET1T218600 | Full-length | US20120121607 (SEQ ID | 46.27 | Vip | 135 | 136 |
| | | NO: 0006), BAK40944, | | | | |
| | | AB604032 | | | | |
| AGRMET1T219032 | Full-length | JP2011526150 (SEQ ID | 41.21 | Vip | 137 | 138 |
| | | NO: 0041), JP2011526150 | | | | |
| | | (SEQ ID NO: 0147), | | | | |
| | | JP2011526150 (SEQ ID | | | | |
| | | NO: 0148) | | | | |
| AGRMET1T218883 | Full-length | AEB20803, JP2011526150 | 29.53 | Vip | 139 | 140 |
| | | (SEQ ID NO: 0041), | | | | |
| | | JP2011526150 (SEQ ID | | | | |
| | | NO: 0147) | | | | |
| AGRMET1T219117 | Full-length | HQ639674, AEC11570, | 33.23 | Vip | 141 | 142 |
| | | HQ639679 | | | | |
| AGRMET1T697885 | Partial | JP2011526150 (SEQ ID | 56.76 | Cry | 143 | 144 |
| | | NO: 0065), JP2011526150 | | | | |
| | | (SEQ ID NO: 0195), | | | | |
| | | JP2011526150 (SEQ ID | | | | |
| | | NO: 0196) | | | | |
| AGRMET1T218491 | Full-length | WO2010099365 (SEQ ID | 67.48 | Cry | 145 | 146 |
| | | NO: 0023), WO2010099365 | | | | |
| | | (SEQ ID NO: 0109), | | | | |
| | | WO2010099365 (SEQ ID | | | | |
| | | NO: 0110) | | | | |
| AGRMET1T218662 | Full-length | WO2010099365 (SEQ ID | 59.95 | Cry | 147 | 148 |
| | | NO: 0023), WO2010099365 | | | | |
| | | (SEQ ID NO: 0109), | | | | |
| | | WO2010099365 (SEQ ID | | | | |
| | | NO: 0110) | | | | |
| AGRMET1T218366 | Partial | HQ221867, ADO51070 | 89.64 | Cry | 149 | 150 |
| AGRMET1T218673 | Full-length | WO2011014749 (SEQ ID | 29.94 | Cry | 151 | 152 |
| | | NO: 0016), US20110030096 | | | | |
| | | (SEQ ID NO: 0016) | | | | |
| AGRMET1T218582 | Partial | JP2011526150 (SEQ ID | 34.62 | Cry | 153 | 154 |
| | | NO: 0009), JP2011526150 | | | | |
| | | (SEQ ID NO: 0083), | | | | |
| | | JP2011526150 (SEQ ID | | | | |
| | | NO: 0084) | | | | |
| AGRMET1T218580 | Partial | JP2011526150 (SEQ ID | 31.44 | Cry | 155 | 156 |
| | | NO: 0009), JP2011526150 | | | | |
| | | (SEQ ID NO: 0083), | | | | |
| | | JP2011526150 (SEQ ID | | | | |
| | | NO: 0084) | | | | |
| AGRMET1T697805 | Partial | ADO51070, HQ221867 | 89.19 | Cry | 157 | 158 |
| AGRMET1T697793 | Partial | ABY46520 | 80.85 | Cry | 159 | 160 |
| AGRMET1T697907 | Partial | BAC77648, AB112346 | 74.68 | Cry | 161 | 162 |
| AGRMET1T166424 | Partial | CAA09344, CAD30080, | 100.00 | Cry | 163 | 164 |
| | | AJ010753 | | | | |
| AGRMET1T697865 | Partial | US Pat. U.S. Pat. No. 4,652,628 (SEQ ID | 100.00 | Cry | 165 | 166 |
| | | NO: 0001) | | | | |
| AGRMET1T697862 | Partial | US Appl. US20100017914 | 98.00 | Cry | 167 | 168 |
| | | (SEQ ID NO: 0078) | | | | |
| AGRMET1T218478 | Partial | WO2010099365 (SEQ ID | 36.63 | Cry | 169 | 170 |
| | | NO: 0041), WO2010099365 | | | | |
| | | (SEQ ID NO: 0183), | | | | |
| | | WO2010099365 (SEQ ID | | | | |
| | | NO: 0184) | | | | |
| AGRMET1T697789 | Partial | WO2010099365 (SEQ ID | 68.84 | Cry | 171 | 172 |
| | | NO: 0023) | | | | |
| AGRMET1T697804 | Partial | ACF15199, CN101824419 | 61.86 | Cry | 173 | 174 |
| | | (SEQ ID NO: 0002), | | | | |
| | | CN101824419 (SEQ ID | | | | |
| | | NO: 0001) | | | | |
| AGRMET1T697798 | Partial | US Pat. U.S. Pat. No. 5,424,410 (SEQ ID | 79.25 | Cry | 175 | 176 |
| | | NO: 0029) | | | | |
| AGRMET1T218291 | Full-length | WO2010099365 (SEQ ID | 31.65 | Cry | 177 | 178 |
| | | NO: 0041), WO2010099365 | | | | |
| | | (SEQ ID NO: 0183), | | | | |
| | | WO2010099365 (SEQ ID | | | | |
| | | NO: 0184) | | | | |
| AGRMET1T218530 | Partial | JP2011526150 (SEQ ID | 61.96 | Cry | 179 | 180 |
| | | NO: 0193), JP2011526150 | | | | |
| | | (SEQ ID NO: 0194), | | | | |
| | | WO2009158470 (SEQ ID | | | | |
| | | NO: 0264) | | | | |
| AGRMET1T697889 | Partial | EP1947184 (SEQ ID | 65.07 | Cry | 181 | 182 |
| | | NO: 0024), US20040210964 | | | | |
| | | (SEQ ID NO: 0006) | | | | |
| AGRMET1T218952 | Partial | AZE84646, WO2011014749 | 48.39 | Cry | 183 | 184 |
| | | (SEQ ID NO: 0016) | | | | |
| AGRMET1T218383 | Partial | ADO51070, HQ221867 | 85.04 | Cry | 185 | 186 |
| AGRMET1T218678 | Partial | JP2011526150 (SEQ ID | 44.29 | Cry | 187 | 188 |
| | | NO: 0193), JP2011526150 | | | | |
| | | (SEQ ID NO: 0194), | | | | |
| | | WO2009158470 (SEQ ID | | | | |
| | | NO: 0264) | | | | |
| AGRMET1T218616 | Partial | JP2011526150 (SEQ ID | 48.53 | Cry | 189 | 190 |
| | | NO: 0069), WO2009158470 | | | | |
| | | (SEQ ID NO: 0131) | | | | |
| AGRMET1T218876 | Full-length | WO2010099365 (SEQ ID | 26.41 | Cry | 191 | 192 |
| | | NO: 0040), WO2010099365 | | | | |
| | | (SEQ ID NO: 0117), | | | | |
| | | WO2010099365 (SEQ ID | | | | |
| | | NO: 0118) | | | | |
| AGRMET1T218404 | Partial | AZE84673, WO2011014749 | 89.33 | Cry | 193 | 194 |
| | | (SEQ ID NO: 0043) | | | | |
| AGRMET1T218319 | Full-length | WO2010099365 (SEQ ID | 40.03 | Cry | 195 | 196 |
| | | NO: 0035), WO2010099365 | | | | |
| | | (SEQ ID NO: 0159), | | | | |
| | | WO2010099365 (SEQ ID | | | | |
| | | NO: 0160) | | | | |
| AGRMET1T219034 | Full-length | WO2010099365 (SEQ ID | 23.01 | Cry | 197 | 198 |
| | | NO: 0040), WO2010099365 | | | | |
| | | (SEQ ID NO: 0117), | | | | |
| | | WO2010099365 (SEQ ID | | | | |
| | | NO: 0118) | | | | |
| AGRMET1T697771 | Full-length | WO2010099365 (SEQ ID | 29.08 | Cry | 199 | 200 |
| | | NO: 0041), WO2010099365 | | | | |
| | | (SEQ ID NO: 0183), | | | | |
| | | WO2010099365 (SEQ ID | | | | |
| | | NO: 0184) | | | | |
| AGRMET1T219087 | Partial | WO2010099365 (SEQ ID | 30.50 | Cry | 201 | 202 |
| | | NO: 0042), WO2010099365 | | | | |
| | | (SEQ ID NO: 0185), | | | | |
| | | WO2010099365 (SEQ ID | | | | |
| | | NO: 0186) | | | | |
| AGRMET1T218636 | Full-length | WO2010099365 (SEQ ID | 26.65 | Cry | 203 | 204 |
| | | NO: 0042), WO2010099365 | | | | |
| | | (SEQ ID NO: 0185), | | | | |
| | | WO2010099365 (SEQ ID | | | | |
| | | NO: 0186) | | | | |
| AGRMET1T697780 | Partial | WO2011014749 (SEQ ID | 32.04 | Cry | 205 | 206 |
| | | NO: 0016), US20110030096 | | | | |
| | | (SEQ ID NO: 0016) | | | | |

### Example 5

### Construction of Synthetic Toxin Genes

[0242] In some experiments, synthetic toxin sequences are generated. These synthetic sequences may have an altered DNA sequence relative to the parent toxin sequence, and encode a protein that is collinear with the parent toxin protein to which it corresponds, but optionally lacks the C-terminal “crystal domain” present in many delta-endotoxin proteins.

[0243] In some other experiments, modified versions of synthetic genes are designed such that the resulting peptide is targeted to a plant organelle, such as the endoplasmic reticulum or the apoplast. Peptide sequences known to result in targeting of fusion proteins to plant organelles are known in the art. For example, the N-terminal region of the acid phosphatase gene from the White Lupin Lupinus albus (Miller et al., Plant Physiology 127: 594-606, 2001) is known to result in endoplasmic reticulum targeting of heterologous proteins. If the resulting fusion protein also contains an endoplasmic retention sequence comprising the peptide N-terminus-lysine-aspartic acid-glutamic acid-leucine (i.e. the “KDEL” motif) at the C-terminus, the fusion protein can be targeted to the endoplasmic reticulum. If the fusion protein lacks an endoplasmic reticulum targeting sequence at the C-terminus, the protein can be targeted to the endoplasmic reticulum, but can ultimately be sequestered in the apoplast.

### Example 6

### Expression in Bacillus Spp. Cell and Pseudomonas Spp. Cell

[0244] In some experiments, biotoxins having sequences as disclosed herein are synthesized and cloned into a vector suitable for Bacillus spp. or Pseudomonas spp., by using known cloning methods. For transformation, Bacillus spp. or Pseudomonas spp. cultures are prepared appropriately according to transformation procedures known in the art. The resulting Bacillus spp. or Pseudomonas spp. recombinant strains, containing the vector with the toxin genes are cultured individually on a conventional growth media, such as CYS media (10 g/l Bacto-casitone; 3 g/l yeast extract; 6 g/l KH₂PO₄; 14 g/l K₂HPO₄; 0.5 mM MgSO₄; 0.05 mM MnCl₂; 0.05 mM FeSO₄), until sporulation is evident by microscopic examination. Samples are prepared and tested for activity in bioassays.

### Example 7

### Functional In Vitro Bioassays

[0245] DNA molecules encoding toxins or predicted toxin domains as disclosed in the present application are separately cloned into a suitable E. coli expression vector containing a selectable antibiotic resistant marker, followed by transformation of E. coli competent cells with individual plasmids. For each construct, a single colony is inoculated in LB medium supplemented with the antibiotic and grown overnight at 37° C. The following day, fresh media are inoculated with 1% of overnight culture and grown at 37° C. to logarithmic phase. Each cell pellet is suspended in a Tris buffer (20 mM Tris-Cl buffer, pH 7.4, 200 mM NaCl, 1 mM DTT) with protease inhibitors and sonicated. Expression of the toxin proteins are confirmed by SDS-PAGE analysis. Toxin proteins are then purified by techniques known in the art (see, e.g., Sambrook and Russell, 2001, supra). Purified proteins are tested in insect assays with appropriate controls. A 5 day read of the plates show that the toxin proteins have pesticidal activity against Diamondback moth and Southwestern corn borer pests.

### Example 8

### Additional Assays for Pesticidal Activity

[0246] The ability of a pesticidal protein to act as a pesticide upon a pest is often assessed in a number of ways. One way well known in the art is to perform a feeding assay. In such a feeding assay, one exposes the pest to a sample containing either toxins/compounds to be tested, or control samples. Often this is performed by placing the material to be tested, or a suitable dilution of such material, onto a material that the pest will ingest, such as an artificial diet. The material to be tested may be composed of a liquid, solid, or slurry. The material to be tested may be placed upon the surface and then allowed to dry. Alternatively, the material to be tested may be mixed with a molten artificial diet, and then dispensed into the assay chamber. The assay chamber may be, for example, a cup, a dish, or a well of a microtiter plate.

[0247] Assays for sucking pests (for example aphids) may involve separating the test material from the insect by a partition, ideally a portion that can be pierced by the sucking mouth parts of the sucking insect, to allow ingestion of the test material. Often the test material is mixed with a feeding stimulant, such as sucrose, to promote ingestion of the test compound.

[0248] Other types of assays can include microinjection of the test material into the mouth, or gut of the pest, as well as development of transgenic plants, followed by test of the ability of the pest to feed upon the transgenic plant. Plant testing may involve isolation of the plant parts normally consumed, for example, small cages attached to a leaf, or isolation of entire plants in cages containing insects. Other methods and approaches to assay pests are known in the art, and can be found, for example in Robertson and Preisler (Pesticide Bioassays with Arthropods, CRC Press, Science, 1992).

### Example 9

### Transformation of Plants, Plant Cells, and Tissues

[0249] Vector construction: Each of the coding regions of the genes of the invention is connected independently with appropriate promoter and terminator sequences for expression in plants. Such sequences are well known in the art and may include a viral CaMV 35S promoter, a rice actin promoter or a maize ubiquitin promoter for expression in monocots, the Arabidopsis UBQ3 promoter or for expression in dicots, and the NOS or OCS terminators. Techniques for producing and confirming promoter-gene-terminator constructs also are well known in the art. The following examples are offered by way of illustrations and not by way of limitation.

### Production of the Novel Biotoxin Proteins in Transformed Plants

[0250] Expression cassettes that include either full-length or truncated forms of the biotoxin proteins as described above are made in suitable shuttle vectors by routine procedures, using a CaMV 35S promoter (Howell and Hull, Virology 1978) and a ubiquitin promoter (Christensen et al., Plant Mol. Biol. 1992). In some instances, to optimize expression efficiency of the biotoxin proteins in the host plant, the codon usage of the open reading frame is adapted to that of the host plant such that alternative codons are used while encoding for the same protein. Such altered sequences are generated by the Reverse Translate software, which is a codon-optimization software that can be found on the World Wide Web at bioinformatics.org/sms2/rev_trans.html. Plant cells, including e.g. barley, wheat, triticale, corn, cotton, and rice cells, are then transformed with the resulting recombinant vectors.

[0251] Barley, wheat, triticale, corn cells are stably transformed by either Agrobacterium-mediated transformation or by electroporation using wounded and enzyme-degraded embryogenic callus, as described in, e.g., Henzel et al. (Inter. J. of Plant Genomics, 2009); PCT Appl. No. WO 92/09696 and U.S. Pat. No. 5,641,664.

[0252] Cotton cells are stably transformed by Agrobacterium-mediated transformation as described by, e.g., Umbeck et al., 1987, and U.S. Pat. No. 5,004,863.

[0253] Rice cells are stably transformed by essentially following the method described by Hiei et al., Plant J. August, 6(2):271-82, 1994; and PCT Appl. No. WO 92/09696.

[0254] Regenerated transformed corn, cotton and rice plants are selected by Northern blot, Southern blot, ELISA, and insecticidal effect, or a combination of these techniques. Biotoxin sequence-containing progeny plants show improved resistance to insects compared to untransformed control plants with appropriate segregation of insect resistance and the transformed phenotype. Protein and RNA measurements show that increased insect resistance is linked with higher expression of the novel Cry protein in the plants.

Agrobacterium-Mediated Transformation of Maize Cell with the Toxin-Encoded Sequences of the Invention

[0255] Maize embryos are isolated from the 8-12 DAP ears, and those embryos of 0.8-1.5 mm in size are used for transformation. Embryos are plated with the scutellum side up on a suitable incubation media, and optionally incubated overnight at 25° C. in the dark. Embryos are then contacted with an Agrobacterium strain containing the appropriate vectors for Ti plasmid mediated transfer for 5-10 min, and then plated onto co-cultivation media for 3 days (25° C. in the dark). After co-cultivation, explants are transferred to recovery period media for five days (at 25° C. in the dark). Explants are incubated in suitable selection media for up to eight weeks, depending on the nature and characteristics of the particular selection utilized. After the selection period, the resulting callus is transferred to embryo maturation media, until the formation of mature somatic embryos is observed. The resulting mature somatic embryos are then placed under low light, and the process of regeneration is initiated as known in the art. The resulting shoots are allowed to root on rooting media, and the resulting plants are transferred to nursery pots and propagated as transgenic plants.

Transformation of Maize Cells with the Toxin-Encoded Sequences of the Invention by Using Aerosol Beam Technology.

[0256] Maize embryos are isolated from the 8-12 DAP ears, and those embryos of 0.8-1.5 mm in size are used for transformation. Embryos are plated scutellum side-up on a suitable incubation media, such as DN62A5S media (3.98 g/L N6 Salts; 1 mL/L of 1000× Stock N6 Vitamins; 800 mg/L L-Asparagine; 100 mg/L Myo-inositol; 1.4 g/L L-Proline; 100 mg/L Casaminoacids; 50 g/L sucrose; 1 mL/L of 1 mg/mL Stock 2,4-D), and incubated overnight at 25° C. in the dark. The resulting explants are transferred to mesh squares (30-40 per plate), then transferred onto osmotic media for 30-45 minutes, and subsequently transferred to a beaming plate (see, for example, PCT Appl. No. WO200138514 and U.S. Pat. No. 5,240,842).

[0257] DNA constructs designed to express the sequences of the invention in plant cells are accelerated into plant tissue using an aerosol beam accelerator, using conditions essentially as described in PCT Appl. No. WO200138514. After beaming, embryos are incubated for 30 min on osmotic media, and then placed onto incubation media overnight at 25° C. in the dark. To avoid damaging beamed explants, they are incubated for at least 24 hours prior to transfer to recovery media. Embryos are then spread onto recovery period media, for 5 days, 25° C. in the dark, transferred to a selection media. Explants are incubated in selection media for up to eight weeks, depending on the nature and characteristics of the particular selection utilized. After the selection period, the resulting callus is transferred to embryo maturation media, until the formation of mature somatic embryos is observed. The resulting mature somatic embryos are then placed under low light, and the process of regeneration is initiated by methods known in the art. The resulting shoots are allowed to root on rooting media, and the resulting plants are transferred to nursery pots and propagated as transgenic plants.

[0258] A number of embodiments of the invention have been described. Nevertheless, it will be understood that elements of the embodiments described herein can be combined to make additional embodiments and various modifications may be made without departing from the spirit and scope of the invention. Accordingly, other embodiments, alternatives and equivalents are within the scope of the invention as described and claimed herein.

[0259] Headings within the application are solely for the convenience of the reader, and do not limit in any way the scope of the invention or its embodiments.

[0260] All publications and patent applications mentioned in this specification are herein incorporated by reference to the same extent as if each individual publication or patent application was specifically can individually indicated to be incorporated by reference.

The application's sequence listing, which the Patent Office published only in electronic form, follows.

SEQUENCE LISTING (208 sequences)

SEQ ID NO: 1 - DNA, 1123 bp, Bacillus sp.
  misc_feature: SGI cDNA ID NO. SG1METG47190
  misc_feature: SGI cDNA ID NO. AGRMET1G175799
  misc_feature: Encodes the peptide sequence at SEQ ID NO 2
  misc_feature: Useful for conferring pesticidal activity to an organism
  misc_feature: Useful for controlling a pest organism
attaagagatttccgttaccaaaaaaagttataacagggttatttgccggagcaatggctttatctatctgggctccggaaagtcaagcagcaactccagagaagaataaatattataatattaatttgaaagctaatacatggttaaagtggaatgtagagggagcatctactaataatggtcccacaattcgtttatggggtggaagcaataatgaaaatgaaaaattcacatttttcccacttgatggaggagcatatgcaatcgtaaataaaaatagtggaaaacctgtaacagttcaaagtggatccaatatattgactcaatatagttggactggtgccgctaatgaacaatggtatttacgaaaccagggaaataattattatgaaattgtgcaccaagcaactgggaaagttgcatcttatgcacgaaatgggaatgcagagtatgtagatttggatgattcaaatccttatgatccagatagggtattccaaatttccgatgctggtgctagtgttcaactaccaaccttaccaactataggatctagaccaaatgctccagagtataatccaactgggcctattgatcaacagttacctcaaacttcaggttctgttgttgttggtgcaacttcaataccatgtattatggtaaatgataatcaagcaagtgactataccaaaatacacaattcaccatattatgttttggtaaaagaagaatattgggagaaagtacgttcagaaattattcctgctggtggctctagtaagtatactgttacaacaggtgtaagtactgaagatcaacaaaggatgactgatacgctttctatgaactttggagcagatttaggatttaaatttaaggccgtatctgcgtcgcttcaatatggtatttcaaaaacattgcaaacagaaattagtacaacttctacggaatcaacggaatcaacagaggaaaagactattacaagtatatctggtaaagatacaggatatacagcatatcaactggtgacaaaatatacgttaaagagaacagacggttcagctgtttcaagttcttggactgtaagagacccgaatcaaacactagtaagaacaataacta

SEQ ID NO: 2 - protein, 374 aa, Bacillus sp.
  misc_feature: SGI Peptide ID NO. SG1METT47190
  misc_feature: SGI Peptide ID NO. AGRMET1T175799
  misc_feature (178)..(372): Pfam Id: PF05431 Pfam Desc: Insecticidal Crystal Toxin, P42
  misc_feature (38)..(148): Pfam Id: PF00652 Pfam Desc: Ricin-type beta-trefoil lectin domain
  misc_feature (11)..(373): NCBI GI: 229100569 Blast Desc: 41.9 kDa insecticidal toxin [Bacillus cereus Rock3-29] gi|229106953|ref|ZP_04237053.1| 41.9 kDa insecticidal toxin [Bacillus cereus Rock3-28] gi|229119132|ref|ZP_04248459.1| 41.9
  misc_feature (51)..(373): NCBI GI: 228911944 Blast Desc: 41.9 kDa insecticidal toxin [Bacillus thuringiensis IBL 200] gi|228847693|gb|EEM92619.1| 41.9 kDa insecticidal toxin [Bacillus thuringiensis IBL 200]
  misc_feature (34)..(368): NCBI GI: 229170564 Blast Desc: 41.9 kDa insecticidal toxin [Bacillus cereus AH621] gi|228612913|gb|EEK70090.1| 41.9 kDa insecticidal toxin [Bacillus cereus AH621]
  misc_feature (56)..(364): NCBI GI: 117322 Blast Desc: BINB3_BACSH RecName: Full=Larvicidal toxin 51 kDa protein; AltName: Full=Strains IAB59/IAB872/IAB881/PR1/ 9002 gi|40225|emb|CAA33086.1| protein product [Bacillus sphaericus] of
  misc_feature (56)..(364): NCBI GI: 2293370 Blast Desc: P51 component of binary toxin [Bacillus sphaericus] gi|3641860|emb|CAA04290.1| BinB4 protein [Bacillus sphaericus]
  misc_feature (56)..(364): NCBI GI: 4467364 Blast Desc: BinB protein [Bacillus sphaericus]
  misc_feature (56)..(364): NCBI GI: 169825569 Blast Desc: larvicidal toxin 51 kDa protein [Lysinibacillus sphaericus C3-41] gi|169828674|ref|YP_001698832.1| larvicidal toxin 51 kDa protein [Lysinibacillus sphaericus C3-41] RecName:
  misc_feature (56)..(364): NCBI GI: 117321 Blast Desc: larvicidal toxin 51 kDa protein [Lysinibacillus sphaericus C3-41] gi|169828674|ref|YP_001698832.1| larvicidal toxin 51 kDa protein [Lysinibacillus sphaericus C3-41] RecName:
  misc_feature (33)..(370): NCBI GI: 117318 Blast Desc: BINA2_BACSH RecName: Full=41.9 kDa insecticidal toxin; AltName: Full=Strain 2297 gi|40223|emb|CAA30074.1| protein product [Bacillus sphaericus] gi|4467365|emb|CAB37658.1| BinA
  misc_feature (56)..(364): NCBI GI: 112297517 Blast Desc: binary toxin B [Lysinibacillus sphaericus]
  misc_feature: Useful for conferring pesticidal activity to an organism
  misc_feature: Useful for controlling a pest organism
IKRFPLPKKVITGLFAGAMALSIWAPESQAATPEKNKYYNINLKANTWLKWNVEGASTNNGPTIRLWGGSNNENEKFTFFPLDGGAYAIVNKNSGKPVTVQSGSNILTQYSWTGAANEQWYLRNQGNNYYEIVHQATGKVASYARNGNAEYVDLDDSNPYDPDRVFQISDAGASVQLPTLPTIGSRPNAPEYNPTGPIDQQLPQTSGSVVVGATSIPCIMVNDNQASDYTKIHNSPYYVLVKEEYWEKVRSEIIPAGGSSKYTVTTGVSTEDQQRMTDTLSMNFGADLGFKFKAVSASLQYGISKTLQTEISTTSTESTESTEEKTITSISGKDTGYTAYQLVTKYTLKRTDGSAVSSSWTVRDPNQTLVRTIT

SEQ ID NO: 3 - DNA, 1110 bp, Bacillus sp.
  misc_feature: SGI cDNA ID NO. SG1METG47191
  misc_feature: SGI cDNA ID NO. AGRMET1G149941
  misc_feature: Encodes the peptide sequence at SEQ ID NO 4
  misc_feature: Useful for conferring pesticidal activity to an organism
  misc_feature: Useful for controlling a pest organism
atcgaaacaacagctcaacttacccgtgaagtgtacactgatccaataggatataacccatcaaatccagaaggttcaggatttggtattccttgggcgaatcttaaatcacatgattttactcaaatcgagagagaagtaattcgtccaccacatgcatttagtatattaaattcagtagaaattggtacagtaaaggcgaagcttttgttcaatgataatgcatatattaactattggtctggacatttattagaatatacttatacgaatgactcggaaacttataaaaaagattacggtaatcttaatacttccgaaaaaaataagattgatttaaagaataaggatatttataaaattgattcaactgcggtatgtttagctaattcatacacatacatatacggatgtacaaaatcaaattttcaaatggtaaatagagatagtttaaatccaacatctcattcttattccaaaacgcatacagctattccatcaaaaatacagaattatgattcagaaaatgaattaccacaagaaacaactgaccaaccaagttatcaatcatataatcatagattaggccatatcacaacttatcctttttggtatacaaatggttctaacagtcagagtggattcttaccggtatttgcttggacacatcggagtgccaatctcaataactttattgactccaaaaaaatcacacaaattccagcagtaaaaagtatagaagctgtaatgaatcataactctataagtattgaaaaatgttctggatatacaggtggagatgtagtagtttgtaataacactggaagtcgagaaagggttgcttttctttacgccacggcagcagaaaatgcagtgtctcaaaaatatcgtgttagagttcgatatgcgtcagaattagctggcgaactacacttaataataaaaaagtctaatagtgattggaaagatcaaagagctaatgcaaaagttatacagacaaagaacttggaagaaaatttgacatataaaaatttccaatatgctgaatttgatgaattagtagctcccttagtacctaattttcttatagaaattataacgttagatatg

SEQ ID NO: 4 - protein, 370 aa, Bacillus sp.
  misc_feature: SGI Peptide ID NO. SG1METT47191
  misc_feature: SGI Peptide ID NO. AGRMET1T149941
  misc_feature (237)..(352): Pfam Id: PF03944 Pfam Desc: delta endotoxin
  misc_feature (3)..(226): Pfam Id: PF00555 Pfam Desc: delta endotoxin
  misc_feature (1)..(370): NCBI GI: 228911986 Blast Desc: Pesticidal crystal protein cry8Ba [Bacillus thuringiensis IBL 200] gi|228847641|gb|EEM92570.1| Pesticidal crystal protein cry8Ba [Bacillus thuringiensis IBL 200]
  misc_feature (1)..(350): NCBI GI: 8928018 Blast Desc: CR8AA_BACUK RecName: Full=Pesticidal crystal protein cry8Aa; AltName: Full=131 kDa crystal protein; AltName: Full=Crystaline entomocidal protoxin; AltName: Full=Insecticidal
  misc_feature (1)..(314): NCBI GI: 237511651 Blast Desc: pesticidal crystal protein [Bacillus thuringiensis]
  misc_feature (1)..(350): NCBI GI: 158021540 Blast Desc: insecticidal crystal protein [Bacillus thuringiensis]
  misc_feature (1)..(348): NCBI GI: 295039404 Blast Desc: Cry8Da protein [Bacillus thuringiensis serovar galleriae]
  misc_feature (1)..(348): NCBI GI: 295039400 Blast Desc: Cry8Da protein [Bacillus thuringiensis serovar galleriae]
  misc_feature (1)..(348): NCBI GI: 295039398 Blast Desc: Cry8Da protein [Bacillus thuringiensis serovar galleriae]
  misc_feature (1)..(348): NCBI GI: 295039402 Blast Desc: Cry8Da protein [Bacillus thuringiensis serovar galleriae]
  misc_feature (1)..(348): NCBI GI: 22122188 Blast Desc: cry8 [Bacillus thuringiensis serovar galleriae]
  misc_feature (1)..(348): NCBI GI: 295039406 Blast Desc: Cry8Da protein [Bacillus thuringiensis serovar galleriae]
  misc_feature: Useful for conferring pesticidal activity to an organism
  misc_feature: Useful for controlling a pest organism
IETTAQLTREVYTDPIGYNPSNPEGSGFGIPWANLKSHDFTQIEREVIRPPHAFSILNSVEIGTVKAKLLFNDNAYINYWSGHLLEYTYTNDSETYKKDYGNLNTSEKNKIDLKNKDIYKIDSTAVCLANSYTYIYGCTKSNFQMVNRDSLNPTSHSYSKTHTAIPSKIQNYDSENELPQETTDQPSYQSYNHRLGHITTYPFWYTNGSNSQSGFLPVFAWTHRSANLNNFIDSKKITQIPAVKSIEAVMNHNSISIEKCSGYTGGDVVVCNNTGSRERVAFLYATAAENAVSQKYRVRVRYASELAGELHLIIKKSNSDWKDQRANAKVIQTKNLEENLTYKNFQYAEFDELVAPLVPNFLIEIITLDM

SEQ ID NO: 5 - DNA, 1032 bp, Bacillus sp.
  misc_feature: SGI cDNA ID NO. SG1METG47195
  misc_feature: SGI cDNA ID NO. AGRMET1G151968
  misc_feature: Encodes the peptide sequence at SEQ ID NO 6
  misc_feature: Useful for conferring pesticidal activity to an organism
  misc_feature: Useful for controlling a pest organism
acagataataatgctaatgttcaacaatatgaatatcttaaagaagcactttctgaaaggttttttcttcaccctttagattacaattattatgcaatcattaatctaaacagtggtaaagttatagatataagtgggaatcaaacaggcaataatgctaatattcaacaatttgagtggcgtggcgatgcattttctgaatactggtactttcgtcgtgaagcagatggatattatgttattgaatcaaaacatagtggcaaagttttagatatagaaggaaatcaaacaagtaataatgctaacgttcaacaatttgagtttctcaaagatgcaccttctgaaagatttgcagttgaagaagcaggaagtgtctcactcccatcgataaatacgcaaccattatcacccgtaccacaatatgaaacaattaatgaccaacttcccgaagaaacagaacgtgtggtaacagcatttacaatagttccagcaattgcagtaaaagatccacattatggtggaaatacagctaaacaaataaaagaaaatccttattatatggttgtgaaaaaacaatggtggaaaaaacaagaatcttatgttttagctcctggtgaaacatataattttgaagtaacaaccggtataagggtaaccgatcaagaaacagcaacaaagacagttagttggagtattggtgctgatatgggctttagttttaaaggattctcacttggaatgacttctcaatattcacaggagttacagacctcaataagtcatacaactgaacaattaaaagaagaaacaaaaaggcatactataacaaatcctttttcagagagaatggcatattctagatatatattaacgacagaatattctgtccaaaggaaaagtggtacaattgtaaattctccttggacaatgactgacaagaataatgcaaatgctgtgacttttccaaaaactacagaaaaaatattgaatgaaaatataaaacaaatatcaaaaagtgaaagtctaaattaa

SEQ ID NO: 6 - protein, 343 aa, Bacillus sp.
  misc_feature: SGI Peptide ID NO. SG1METT47195
  misc_feature: SGI Peptide ID NO. AGRMET1T151968
  misc_feature (127)..(323): Pfam Id: PF05431 Pfam Desc: Insecticidal Crystal Toxin, P42
  misc_feature (25)..(106): Pfam Id: PF00652 Pfam Desc: Ricin-type beta-trefoil lectin domain
  misc_feature (1)..(342): NCBI GI: 229170564 Blast Desc: 41.9 kDa insecticidal toxin [Bacillus cereus AH621] gi|228612913|gb|EEK70090.1| 41.9 kDa insecticidal toxin [Bacillus cereus AH621]
  misc_feature (11)..(323): NCBI GI: 228911944 Blast Desc: 41.9 kDa insecticidal toxin [Bacillus thuringiensis IBL 200] gi|228847693|gb|EEM92619.1| 41.9 kDa insecticidal toxin [Bacillus thuringiensis IBL 200]
  misc_feature (19)..(323): NCBI GI: 229100569 Blast Desc: 41.9 kDa insecticidal toxin [Bacillus cereus Rock3-29] gi|229106953|ref|ZP_04237053.1| 41.9 kDa insecticidal toxin [Bacillus cereus Rock3-28] gi|229119132|ref|ZP_04248459.1| 41.9
  misc_feature (21)..(340): NCBI GI: 117318 Blast Desc: BINA2_BACSH RecName: Full=41.9 kDa insecticidal toxin; AltName: Full=Strain 2297 gi|40223|emb|CAA30074.1| protein product [Bacillus sphaericus] gi|4467365|emb|CAB37658.1| BinA
  misc_feature (126)..(340): NCBI GI: 112297518 Blast Desc: binary toxin A [Lysinibacillus sphaericus]
  misc_feature (126)..(340): NCBI GI: 169825568 Blast Desc: insecticidal toxin [Lysinibacillus sphaericus C3-41] gi|169828673|ref|YP_001698831.1| insecticidal toxin [Lysinibacillus sphaericus C3-41] RecName: Full=41.9 kDa toxin;
  misc_feature (126)..(340): NCBI GI: 3641861 Blast Desc: BinA4 protein [Bacillus sphaericus]
  misc_feature (126)..(340): NCBI GI: 117319 Blast Desc: BINA3_BACSH RecName: Full=41.9 kDa insecticidal toxin; AltName: Full=Strain IAB59 gi|40226|emb|CAA33087.1| protein product [Bacillus sphaericus]
  misc_feature (126)..(340): NCBI GI: 2293380 Blast Desc: P42 component of the binary toxin [Bacillus sphaericus]
  misc_feature (126)..(340): NCBI GI: 2293372 Blast Desc: P42 component of the binary toxin [Bacillus sphaericus] gi|2293374|emb|CAA73758.1| P42 component of the binary toxin [Bacillus sphaericus] gi|2293376|emb|CAA73759.1| P42
  misc_feature: Useful for conferring pesticidal activity to an organism
  misc_feature: Useful for controlling a pest organism
TDNNANVQQYEYLKEALSERFFLHPLDYNYYAIINLNSGKVIDISGNQTGNNANIQQFEWRGDAFSEYWYFRREADGYYVIESKHSGKVLDIEGNQTSNNANVQQFEFLKDAPSERFAVEEAGSVSLPSINTQPLSPVPQYETINDQLPEETERVVTAFTIVPAIAVKDPHYGGNTAKQIKENPYYMVVKKQWWKKQESYVLAPGETYNFEVTTGIRVTDQETATKTVSWSIGADMGFSFKGFSLGMTSQYSQELQTSISHTTEQLKEETKRHTITNPFSERMAYSRYILTTEYSVQRKSGTIVNSPWTMTDKNNANAVTFPKTTEKILNENIKQISKSESLN

SEQ ID NO: 7 - DNA, 363 bp, Bacillus sp.
  misc_feature: SGI cDNA ID NO. SG1METG47207
  misc_feature: Encodes the peptide sequence at SEQ ID NO 8
  misc_feature: Useful for conferring pesticidal activity to an organism
  misc_feature: Useful for controlling a pest organism
gatatgggaacgaaagaagtacaagaagtgatgcaacaagtagatgtggaaatagccggtttagccaatgtgttagaagaatataggaatgcttatgatttatataatggtaaaaaattatttaatataccagataagatgacacctggggaatatctgaaaaatgtatttactactgcaaatttgcaattcattcagagaataccgacatttcagaactctaaatatgatgtagcgtttcttccattctttgttcacgctgctgaaatgcatattcttctcgttagggatgcagcaatacatgttcgagaatgggggatggatgaaactgtacaccaaaaactcatattaagaaatgggtag

SEQ ID NO: 8 - protein, 120 aa, Bacillus sp.
  misc_feature: SGI Peptide ID NO. SG1METT47207
  misc_feature (10)..(110): Pfam Id: PF03945 Pfam Desc: delta endotoxin, N-terminal domain
  misc_feature (17)..(106): NCBI GI: 8469161 Blast Desc: CR3CA_BACTK RecName: Full=Pesticidal crystal protein cry3Ca; AltName: Full=73 kDa crystal protein; AltName: Full=Crystaline entomocidal protoxin; AltName: Full=Insecticidal
  misc_feature (17)..(106): NCBI GI: 117324 Blast Desc: CR3BA_BACTO RecName: Full=Pesticidal crystal protein cry3Ba; AltName: Full=75 kDa crystal protein; AltName: Full=Crystaline entomocidal protoxin; AltName: Full=Insecticidal
  misc_feature (9)..(111): NCBI GI: 41688283 Blast Desc: mosquitocidal toxin [Bacillus thuringiensis serovar entomocidus]
  misc_feature (53)..(110): NCBI GI: 228911584 Blast Desc: Pesticidal crystal protein cry1Bc [Bacillus thuringiensis IBL 200] gi|8927997|sp|Q9XDL1.1|CR1ID_BACTU RecName: Full=Pesticidal crystal protein cry1Id; AltName: Full=81
  misc_feature (17)..(117): NCBI GI: 15988322 Blast Desc: Pesticidal crystal protein cry1Bc [Bacillus thuringiensis IBL 200] gi|8927997|sp|Q9XDL1.1|CR1ID_BACTU RecName: Full=Pesticidal crystal protein cry1Id; AltName: Full=81
  misc_feature (17)..(117): NCBI GI: 940200 Blast Desc: Cry3Bb2 [Bacillus thuringiensis]
  misc_feature (17)..(117): NCBI GI: 8469155 Blast Desc: CR3BB_BACTU RecName: Full=Pesticidal crystal protein cry3Bb; AltName: Full=74 kDa crystal protein; AltName: Full=Crystaline entomocidal protoxin; AltName: Full=Insecticidal
  misc_feature (17)..(110): NCBI GI: 33325407 Blast Desc: Cry1Ia [Bacillus thuringiensis]
  misc_feature (17)..(110): NCBI GI: 294987182 Blast Desc: Cry1I toxin crystal protein [Bacillus thuringiensis]
  misc_feature (17)..(110): NCBI GI: 33326396 Blast Desc: Cry1Ia [Bacillus thuringiensis]
  misc_feature: Useful for conferring pesticidal activity to an organism
  misc_feature: Useful for controlling a pest organism
DMGTKEVQEVMQQVDVEIAGLANVLEEYRNAYDLYNGKKLFNIPDKMTPGEYLKNVFTTANLQFIQRIPTFQNSKYDVAFLPFFVHAAEMHILLVRDAAIHVREWGMDETVHQKLILRNG

SEQ ID NO: 9 - DNA, 1176 bp, Bacillus sp.
  misc_feature: SGI cDNA ID NO. SG1METG47218
  misc_feature: SGI cDNA ID NO. AGRMET1G218470
  misc_feature: Encodes the peptide sequence at SEQ ID NO 10
  misc_feature: Useful for conferring pesticidal activity to an organism
  misc_feature: Useful for controlling a pest organism
attatgagatcagtatcaaaaaaagtcatggcagggttaggtgtaggagcaatgagtctatctatctgggctccttcaagtcaagcagcagctccagcaaataatgaatatcatactattcatttggcagctaatacaaacatagcttgggatgtatataaaggatggcaatctgatgatgcaggtattgttctatgggatggagcccgtggtgacaatgaacaatttgtatttttcccacttgatggaggagcatatgcaatcgtaaataaaaatagtggaaaacctgtagggattggtaatgctttcattggtagtgatggtgttcgtgatttttacaatgacaatgatcagggtttgcgacaaacgagttggactggtgccgctaatgaacaatggtatttacgagacaagggaaataataattttgaaattgtaaaccaaggatctgggaaagttgcatcttgggcgggggttcaaaggtatggatttaaagattatgtagatttggatgaatcaaatccttctgataataatagggtatttcatattccagctgcacgcagtactttttcattaccaaccttaccagctgtaggaactagaccaaatgctccagattataatacaagtgggactattgatcaacaattacctcaaacgtcaaattctgttgttgttggggcatctttaataccatctatcatggtaaaggataatggtgcgagtgattatacaaaaatacacaattcaccatattatgtcttagtaaaagaagaatattgggagaaagtacgctcagaaattattcctgctggtgccactagtaaatatacagttaaatcaggtgtaagtgagatagatcaaaaaaagatgtctgatacgcttgcaatgagctttggttcagacttaggattgaaatttggagaatcatctctatcaattaaatcgagtgtttcaagaacaatacaaacagaagttactaaaacttctacgaatgcaacggaagaaacagaggaaaagagtattccaagtatacctggtaaaaacacaggatttacagcatatcaactggtaacaaaatatacagtaaagagaacagacggttcagttgttacagatccttcgattgtaagagacagtaagcaaacgatagcaagaacaatagctaaataa

SEQ ID NO: 10 - protein, 391 aa, Bacillus sp.
  misc_feature: SGI Peptide ID NO. SG1METT47218
  misc_feature: SGI Peptide ID NO. AGRMET1T218470
  misc_feature (64)..(255): Pfam Id: PF05431 Pfam Desc: Insecticidal Crystal Toxin, P42
  misc_feature (1)..(261): NCBI GI: 229100569 Blast Desc: 41.9 kDa insecticidal toxin [Bacillus cereus Rock3-29] gi|229106953|ref|ZP_04237053.1| 41.9 kDa insecticidal toxin [Bacillus cereus Rock3-28] gi|229119132|ref|ZP_04248459.1| 41.9
  misc_feature (2)..(261): NCBI GI: 228911944 Blast Desc: 41.9 kDa insecticidal toxin [Bacillus thuringiensis IBL 200] gi|228847693|gb|EEM92619.1| 41.9 kDa insecticidal toxin [Bacillus thuringiensis IBL 200]
  misc_feature (61)..(257): NCBI GI: 117318 Blast Desc: BINA2_BACSH RecName: Full=41.9 kDa insecticidal toxin; AltName: Full=Strain 2297 gi|40223|emb|CAA30074.1| protein product [Bacillus sphaericus] gi|4467365|emb|CAB37658.1| BinA
  misc_feature (61)..(257): NCBI GI: 3641861 Blast Desc: BinA4 protein [Bacillus sphaericus]
  misc_feature (61)..(257): NCBI GI: 2293380 Blast Desc: P42 component of the binary toxin [Bacillus sphaericus]
  misc_feature (61)..(257): NCBI GI: 112297518 Blast Desc: binary toxin A [Lysinibacillus sphaericus]
  misc_feature (61)..(257): NCBI GI: 169825568 Blast Desc: insecticidal toxin [Lysinibacillus sphaericus C3-41] gi|169828673|ref|YP_001698831.1| insecticidal toxin [Lysinibacillus sphaericus C3-41] RecName: Full=41.9 kDa toxin;
  misc_feature (61)..(257): NCBI GI: 2293372 Blast Desc: P42 component of the binary toxin [Bacillus sphaericus] gi|2293374|emb|CAA73758.1| P42 component of the binary toxin [Bacillus sphaericus] gi|2293376|emb|CAA73759.1| P42
  misc_feature (61)..(257): NCBI GI: 117319 Blast Desc: BINA3_BACSH RecName: Full=41.9 kDa insecticidal toxin; AltName: Full=Strain IAB59 gi|40226|emb|CAA33087.1| protein product [Bacillus sphaericus]
  misc_feature (62)..(244): NCBI GI: 2293370 Blast Desc: P51 component of binary toxin [Bacillus sphaericus] gi|3641860|emb|CAA04290.1| BinB4 protein [Bacillus sphaericus]
  misc_feature: Useful for conferring pesticidal activity to an organism
  misc_feature: Useful for controlling a pest organism
IMRSVSKKVMAGLGVGAMSLSIWAPSSQAAAPANNEYHTIHLAANTNIAWDVYKGWQSDDAGIVLWDGARGDNEQFVFFPLDGGAYAIVNKNSGKPVGIGNAFIGSDGVRDFYNDNDQGLRQTSWTGAANEQWYLRDKGNNNFEIVNQGSGKVASWAGVQRYGFKDYVDLDESNPSDNNRVFHIPAARSTFSLPTLPAVGTRPNAPDYNTSGTIDQQLPQTSNSVVVGASLIPSIMVKDNGASDYTKIHNSPYYVLVKEEYWEKVRSEIIPAGATSKYTVKSGVSEIDQKKMSDTLAMSFGSDLGLKFGESSLSIKSSVSRTIQTEVTKTSTNATEETEEKSIPSIPGKNTGFTAYQLVTKYTVKRTDGSVVTDPSIVRDSKQTIARTIAK

SEQ ID NO: 11 - DNA, 2046 bp, Bacillus sp.
  misc_feature: SGI cDNA ID NO. SG1METG47229
  misc_feature: SGI cDNA ID NO. AGRMET1G219103
  misc_feature: Encodes the peptide sequence at SEQ ID NO 12
  misc_feature: Useful for conferring pesticidal activity to an organism
  misc_feature: Useful for controlling a pest organism
atgaattcaaatgacgaaaataaacataataccctaagcaattcatctgatcaatcagtatcatctaattctgaaagtttttctttagcgaacaaccaaactaatgcactacaaatcgagaatgatatagattacctgagagtgtctgaagaaactgaaaacgaagttttaccgaatcgtgagatgtttattagtacacaggattcgctcaaatttggaattaatattgtgggtgaaatcctatcttctttaggcattccattcgttggaccaatagtcagcttctatactaaaattatcgatctattatggccgtcaagtggtggaaagaatccatggcaaatttttatggaacaagtggaaaaactcattgatcaaaaaatagaagaatacgcaagaaataaagcacttgcagaattagaaggactaggagcgaattttgaattatatcgagtggcacttgaagaatggagagaaaacccaaatatctctagaaccacaaggggtgttcgtactcgctttgaaatccttgatggtttatttacacagtatatgccatcttttaaagtatcaggccatgaagtcccattacttacagtatatgcacaggcagcgagcctccatttacttttattaaaagacgtttcaatttttggcgaagaatggggactatctacagccgttataaacaactattataaacgtcaaatgaatcttacagctcaatattctgatcattgtgtaaattggtataacgcgggtttagatagattaaaaggttcaaatgctaaaagttggttaaactatcaccgttttcgtagagaaataacattgatggtattagatttagtagcattatatccaagttttgatgcgcgtacatatccaattgaaacaacagctcaacttacccgtgaagtatacactgatccaataggttataacccatcaacagaaagtccaggatttggtatttcttgggcgagagtcatttctcatgattttaatcaaattgagaaggaagttatccgtccaccacatgcatttgatatattaaattcaatagaaattagaacaataacacagagtcttccacttaatgaaaaagactatattaactattggtgtggacatttattagaatatacttatgcgaattattcggagattcataaaaaggattacggtaatccaagttttactgaaaaaaatatgtattctttaaagaatagggatgtttataaaattatttcatcggcaggatgtttagctaattactacggcggtagatatggaagtacaaaagctacattttatgcggctattagagataacttagaacctacatctttttcttattccaaagcacatacaattctgccatcaaaaatccaaaattatgatacagtggaggaattaccacaaaagacaacagaacaaccagataataaatcatataatcataggttatctcatattactacttatcctttttcgtccaatggctatattggtgttttacccgtatttgcttggacacatcggagtgtaaatctcaataactttattgactccaaaaagattacacaaattccagcagtaaaaagtatacaatctgcaataaatgattcacatgtaagtattgcagagagttccggatatacaggtggagatgtagtagtaagtaagacctatactaatttgaaacgggtattttatcttttagccacagcagcagaaaatgcattatctcaaaaatatcgtgttagagtgcgatatgcgtcagaagtagccggccaattgttactgacagtatcaaagtatcagggtggatgggaaaatcaacaagcttatgccaaaatcatacaaacaaaggaccagaaagaaaatttaacatataaaagttttcaatatgttgaatttgataaattagtggcacccttagtacctgagcctgttatagagattaatacatatgaaatagctagttatactgataagaagttgtatattgataaaatagaatttattccagtctctgaataa

SEQ ID NO: 12 - protein, 681 aa, Bacillus sp.
  misc_feature: SGI Peptide ID NO. SG1METT47229
  misc_feature: SGI Peptide ID NO. AGRMET1T219103
  misc_feature (71)..(293): Pfam Id: PF03945 Pfam Desc: delta endotoxin, N-terminal domain
  misc_feature (528)..(679): Pfam Id: PF03944 Pfam Desc: delta endotoxin
  misc_feature (299)..(517): Pfam Id: PF00555 Pfam Desc: delta endotoxin
  misc_feature (48)..(681): NCBI GI: 228911986 Blast Desc: Pesticidal crystal protein cry8Ba [Bacillus thuringiensis IBL 200] gi|228847641|gb|EEM92570.1| Pesticidal crystal protein cry8Ba [Bacillus thuringiensis IBL 200]
  misc_feature (1)..(681): NCBI GI: 8928018 Blast Desc: CR8AA_BACUK RecName: Full=Pesticidal crystal protein cry8Aa; AltName: Full=131 kDa crystal protein; AltName: Full=Crystaline entomocidal protoxin; AltName: Full=Insecticidal
  misc_feature (1)..(681): NCBI GI: 8928019 Blast Desc: CR8BA_BACUK RecName: Full=Pesticidal crystal protein cry8Ba; AltName: Full=134 kDa crystal protein; AltName: Full=Crystaline entomocidal protoxin; AltName: Full=Insecticidal
  misc_feature (1)..(679): NCBI GI: 194272337 Blast Desc: delta-endotoxin [Bacillus thuringiensis]
  misc_feature (1)..(680): NCBI GI: 67973231 Blast Desc: Cry8 [Bacillus thuringiensis]
  misc_feature (1)..(680): NCBI GI: 34495248 Blast Desc: Cry8Ea1 [Bacillus thuringiensis]
  misc_feature (4)..(679): NCBI GI: 78191077 Blast Desc: Snun8-1 [Bacillus thuringiensis]
  misc_feature (1)..(680): NCBI GI: 22122188 Blast Desc: cry8 [Bacillus thuringiensis serovar galleriae]
  misc_feature (1)..(679): NCBI GI: 295039400 Blast Desc: Cry8Da protein [Bacillus thuringiensis serovar galleriae]
  misc_feature (1)..(680): NCBI GI: 158021542 Blast Desc: crystal protein [Bacillus thuringiensis]
  misc_feature: Useful for conferring pesticidal activity to an organism
  misc_feature: Useful for controlling a pest organism
MNSNDENKHNTLSNSSDQSVSSNSESFSLANNQTNALQIENDIDYLRVSEETENEVLPNREMFISTQDSLKFGINIVGEILSSLGIPFVGPIVSFYTKIIDLLWPSSGGKNPWQIFMEQVEKLIDQKIEEYARNKALAELEGLGANFELYRVALEEWRENPNISRTTRGVRTRFEILDGLFTQYMPSFKVSGHEVPLLTVYAQAASLHLLLLKDVSIFGEEWGLSTAVINNYYKRQMNLTAQYSDHCVNWYNAGLDRLKGSNAKSWLNYHRFRREITLMVLDLVALYPSFDARTYPIETTAQLTREVYTDPIGYNPSTESPGFGISWARVISHDFNQIEKEVIRPPHAFDILNSIEIRTITQSLPLNEKDYINYWCGHLLEYTYANYSEIHKKDYGNPSFTEKNMYSLKNRDVYKIISSAGCLANYYGGRYGSTKATFYAAIRDNLEPTSFSYSKAHTILPSKIQNYDTVEELPQKTTEQPDNKSYNHRLSHITTYPFSSNGYIGVLPVFAWTHRSVNLNNFIDSKKITQIPAVKSIQSAINDSHVSIAESSGYTGGDVVVSKTYTNLKRVFYLLATAAENALSQKYRVRVRYASEVAGQLLLTVSKYQGGWENQQAYAKIIQTKDQKENLTYKSFQYVEFDKLVAPLVPEPVIEINTYEIASYTDKKLYIDKIEFIPVSE

SEQ ID NO: 13 - DNA, 1047 bp, Bacillus sp.
  misc_feature: SGI cDNA ID NO. SG1METG47230
  misc_feature: SGI cDNA ID NO. AGRMET1G143056
  misc_feature: Encodes the peptide sequence at SEQ ID NO 14
  misc_feature: Useful for conferring pesticidal activity to an organism
  misc_feature: Useful for controlling a pest organism
cttacacgggaaatttatacagatccagtagggagttatttgccctacaaaggtaatttcaaggatgttatgtcttggtatgaaatgacaaaatcatatcgccagcctacatttcatgatttagaaagcttaatccgaaagcctagtcagtttacttggctaaaagatcttaagatgtatacaaggaaaagacaaaatgggaaatatgagtattataattattgggtaggacatcagttaaagagagcgttaattggtgaagaatacagaagagaaacaacaattagtggtgaaattactagtgaagaagatacatttacttttgaagattatgatattcatagggttttatgcaattatatagggagatacgataatagtttggtgggggtaaatcaagttgagtttcattatctcgataacaatacacctcggaagaaggaatataaaaaagatattagggttacgagtcaatcacaaaaaataattgactcagaagaggaattacatagtcatagattaagttatgttgaatcttttgatttatattggaatcataaaaatgagaaaggagggacaatacccgtatttggttggacacatcatagtgtagcccctaaaaatataattcatgaggataagattacagtaatctcagctactaaagctactggttatttcacttctgaagttatacaaggtcctggatattcaggaggggatttaatacaaggatctgggtccatgggaagtattcccattactccacctcgtaatgcatataacaaaaaatatcatttgagagttcgctatgccgctgattttaatggattacttacaatgacttttacctctagtagtggaccaggtacagttaagataaactttaatgctacaatgcaaaaaggggattctttcaaatataattcctttcaatatgtagaaaaagtagtatatatttcgtctattaataacggcataaacctcagtgcaggaagtggtttttacttggataaggttgaatttattccagtaaatgaaaattag

SEQ ID NO: 14 - protein, 348 aa, Bacillus sp.
  misc_feature: SGI Peptide ID NO. SG1METT47230
  misc_feature: SGI Peptide ID NO. AGRMET1T143056
  misc_feature (215)..(346): Pfam Id: PF03944 Pfam Desc: delta endotoxin
  misc_feature (1)..(204): Pfam Id: PF00555 Pfam Desc: delta endotoxin
  misc_feature (1)..(348): NCBI GI: 163943265 Blast Desc: Delta endotoxin central region subgroup 1 [Bacillus weihenstephanensis KBAB4] gi|163865462|gb|ABY46520.1| Delta endotoxin central region subgroup 1 [Bacillus weihenstephanensis
  misc_feature (1)..(346): NCBI GI: 283971011 Blast Desc: CryIII insecticidal crystal protein [Bacillus thuringiensis]
  misc_feature (1)..(346): NCBI GI: 41056817 Blast Desc: HBF-1 CryIII delta-endotoxin [Bacillus thuringiensis]
  misc_feature (1)..(346): NCBI GI: 8469159 Blast Desc: CR8CA_BACTP RecName: Full=Pesticidal crystal protein cry8Ca; AltName: Full=130 kDa crystal protein; AltName: Full=Crystaline entomocidal protoxin; AltName: Full=Insecticidal
  misc_feature (1)..(346): NCBI GI: 158021540 Blast Desc: insecticidal crystal protein [Bacillus thuringiensis]
  misc_feature (1)..(347): NCBI GI: 8928019 Blast Desc: CR8BA_BACUK RecName: Full=Pesticidal crystal protein cry8Ba; AltName: Full=134 kDa crystal protein; AltName: Full=Crystaline entomocidal protoxin; AltName: Full=Insecticidal
  misc_feature (1)..(347): NCBI GI: 8928018 Blast Desc: CR8AA_BACUK RecName: Full=Pesticidal crystal protein cry8Aa; AltName: Full=131 kDa crystal protein; AltName: Full=Crystaline entomocidal protoxin; AltName: Full=Insecticidal
  misc_feature (1)..(348): NCBI GI: 237511651 Blast Desc: pesticidal crystal protein [Bacillus thuringiensis]
  misc_feature (1)..(346): NCBI GI: 22122188 Blast Desc: cry8 [Bacillus thuringiensis serovar galleriae]
  misc_feature (1)..(348): NCBI GI: 228988837 Blast Desc: bthur0001_54740 [Bacillus thuringiensis serovar tochigiensis BGSC 4Y1] gi|228770896|gb|EEM19403.1| bthur0001_54740 [Bacillus thuringiensis serovar tochigiensis BGSC
  misc_feature: Useful for conferring pesticidal activity to an organism
  misc_feature: Useful for controlling a pest organism
LTREIYTDPVGSYLPYKGNFKDVMSWYEMTKSYRQPTFHDLESLIRKPSQFTWLKDLKMYTRKRQNGKYEYYNYWVGHQLKRALIGEEYRRETTISGEITSEEDTFTFEDYDIHRVLCNYIGRYDNSLVGVNQVEFHYLDNNTPRKKEYKKDIRVTSQSQKIIDSEEELHSHRLSYVESFDLYWNHKNEKGGTIPVFGWTHHSVAPKNIIHEDKITVISATKATGYFTSEVIQGPGYSGGDLIQGSGSMGSIPITPPRNAYNKKYHLRVRYAADFNGLLTMTFTSSSGPGTVKINFNATMQKGDSFKYNSFQYVEKVVYISSINNGINLSAGSGFYLDKVEFIPVNEN

SEQ ID NO: 15 - DNA, 2004 bp, Bacillus sp.
  misc_feature: SGI cDNA ID NO. SG1METG47239
  misc_feature: SGI cDNA ID NO. AGRMET1G168537
  misc_feature: Encodes the peptide sequence at SEQ ID NO 16
  misc_feature: Useful for conferring pesticidal activity to an organism
  misc_feature: Useful for controlling a pest organism
atgaataataaaccaaacgattcgaatctactaaataatactaacgcaactgtaatgaatacaataacaaatctctccaacaatgtgcctgatccccaagatgtagagaaagagaatgtaccaccagcatattgtcagtataacagcaaacaaaaaaatactgataatgtgcaagagtgcataggatctactgaagaagaaccaactccacaagtagttccaattattgttgccccaattgtccttacgcccgcaatgttaccaataggtcgatggttagggcaacaactcggcaaatggattctgggtcaggcgacaaaaaaattaaaagaattattattcccatcatcaaatgctctcgaatcagctcttaataaactcagagaagatttagaaagaaagtttgatgaacgattaaaccaagatactcttaatagattacaaggaatatatataggactgctaaacctttctagcgaattcgttgcagcaaccgaaaatttagcaataagtgagaagaaatggtttgaaagtccaaatcctgcaactgagatggacctagagaataagcgttcattagtacgagacaaatttattaatttacatgatcttatcatcgctaggataccagaattcttgattcctaattatgaagagattggattaccaatatatgcccaagtagctactttagacttaattcatctaaaagatggagtattaaaaggagagagttgggggttgagcgcagacgagattcgattttataaagggagattcaattattacctaaataactatacaaacgaagcacaccgtgtatttaatgttgggtttaatcgtttaaaaaacaaaacaaatcatgggattggatatgcccttaactatagaactgctatgaatatttacttgtttgatgttgtctatcaatggtcctttttgagatatgagggtatcacaccaaaagtatctagaagtctttatcattatattggccaatttaataattcattaaataatcgagtaaacatggatggattaatgaaaatcatagaatgcataccaaacaaaagagttagtcaacttaatgtatattactatatgaaaatgagcgggagtgtcccttggcctatcaaggctatccttacttataataaagcccaagatggcgatccatcggcacaaacagtcggttggttagaaacttcaggatctaaaaatgtaacaaaagctgtagttattccaaatcatacaaccgcaagagttaatggccatgtaaagtaccctggtgctgagagatggaatttaacaattcaagagcaacgagttatagccaatgactatattggtaatgatatgaaatttgatcttcaatatcccgatcattttcttcggaatatttcttatattcctggagagatgccttctaatccattttattctttaggtcatcaaattaaatattcttcacctaatggtggaaataatattgtagttggattttcaccgccagagacaaaatctttctttgttgatcgagttcaccttataaaaaaccagaatccagaaaatcatactactataattccagccattcactataatcgactgtctcaccctaatcaatcattctttgatggggaattaggtaatggagcaaatggatcactaattttagcggagactggaaatacagcttattatgacataatttcatactctactaatagattaaatcgtaaaatcatcattcgagtaaaagcaggaagtggtgattttgaactacgagtaaatggtacaaaatatccagttgttatgattggaggagtacctgacaattattatgactatataacagcacaagcatttactatagaatccaataaaaagatagaattaacggtcagtaaaacagctttaggaagttcaaacgaattaaagtataatcaacttcttttagtagatcctgataaattttcaaaaataatagatagatggaattaa

SEQ ID NO: 16 - protein, 667 aa, Bacillus sp.
  misc_feature: SGI Peptide ID NO. SG1METT47239
  misc_feature: SGI Peptide ID NO. AGRMET1T168537
  misc_feature (101)..(314): Pfam Id: PF03945 Pfam Desc: delta endotoxin, N-terminal domain
  misc_feature (29)..(667): NCBI GI: 228911387 Blast Desc: Pesticidal crystal protein cry11Bb [Bacillus thuringiensis IBL 200] gi|228848252|gb|EEM93105.1| Pesticidal crystal protein cry11Bb [Bacillus thuringiensis IBL 200]
  misc_feature (70)..(663): NCBI GI: 8928023 Blast Desc: C11BA_BACTJ RecName: Full=Pesticidal crystal protein cry11Ba; AltName: Full=81 kDa crystal protein; AltName: Full=Crystaline entomocidal protoxin; AltName: Full=Insecticidal
  misc_feature (70)..(654): NCBI GI: 8928042 Blast Desc: C11BB_BACTV RecName: Full=Pesticidal crystal protein cry11Bb; AltName: Full=84 kDa crystal protein; AltName: Full=Crystaline entomocidal protoxin; AltName: Full=Insecticidal
  misc_feature (70)..(654): NCBI GI: 298162158 Blast Desc: delta-endotoxin [Bacillus thuringiensis]
  misc_feature (77)..(332): NCBI GI: 159141846 Blast Desc: Cry4d [Bacillus thuringiensis]
  misc_feature (77)..(332): NCBI GI: 228905289 Blast Desc: Pesticidal crystal protein cry11Bb [Bacillus thuringiensis IBL 4222] gi|228854361|gb|EEM99034.1| Pesticidal crystal protein cry11Bb [Bacillus thuringiensis IBL 4222]
  misc_feature (77)..(332): NCBI GI: 161598562 Blast Desc: pesticidial crystal protein cry11AA [Bacillus thuringiensis serovar israelensis] gi|117327|sp|P21256.1|C11AA_BACTI RecName: Full=Pesticidal kDa
  misc_feature (77)..(332): NCBI GI: 159141842 Blast Desc: Cry4d [Bacillus thuringiensis]
  misc_feature (77)..(332): NCBI GI: 159141852 Blast Desc: Cry4d [Bacillus thuringiensis]
  misc_feature (77)..(332): NCBI GI: 159141848 Blast Desc: Cry4d [Bacillus thuringiensis]
  misc_feature: Useful for conferring pesticidal activity to an organism
  misc_feature: Useful for controlling a pest organism
MNNKPNDSNLLNNTNATVMNTITNLSNNVPDPQDVEKENVPPAYCQYNSKQKNTDNVQECIGSTEEEPTPQVVPIIVAPIVLTPAMLPIGRWLGQQLGKWILGQATKKLKELLFPSSNALESALNKLREDLERKFDERLNQDTLNRLQGIYIGLLNLSSEFVAATENLAISEKKWFESPNPATEMDLENKRSLVRDKFINLHDLIIARIPEFLIPNYEEIGLPIYAQVATLDLIHLKDGVLKGESWGLSADEIRFYKGRFNYYLNNYTNEAHRVFNVGFNRLKNKTNHGIGYALNYRTAMNIYLFDVVYQWSFLRYEGITPKVSRSLYHYIGQFNNSLNNRVNMDGLMKIIECIPNKRVSQLNVYYYMKMSGSVPWPIKAILTYNKAQDGDPSAQTVGWLETSGSKNVTKAVVIPNHTTARVNGHVKYPGAERWNLTIQEQRVIANDYIGNDMKFDLQYPDHFLRNISYIPGEMPSNPFYSLGHQIKYSSPNGGNNIVVGFSPPETKSFFVDRVHLIKNQNPENHTTIIPAIHYNRLSHPNQSFFDGELGNGANGSLILAETGNTAYYDIISYSTNRLNRKIIIRVKAGSGDFELRVNGTKYPVVMIGGVPDNYYDYITAQAFTIESNKKIELTVSKTALGSSNELKYNQLLLVDPDKFSKIIDRWN

SEQ ID NO: 17 - DNA, 890 bp, Bacillus sp.
  misc_feature: SGI cDNA ID NO. SG1METG47244
  misc_feature: SGI cDNA ID NO. AGRMET1G218621
  misc_feature: Encodes the peptide sequence at SEQ ID NO 18
  misc_feature: Useful for conferring pesticidal activity to an organism
  misc_feature: Useful for controlling a pest organism
atgaattcaaatgacgaaaataaacataataccctaagcaattcatctgatcaatcagcatcatctaattctgaaagtttttctttagcgaacaaccaaactaatgcactacaaatcgagaatgatatagattacctgagagtgtctgaagaaactgaaaacgaagttttaccgaatcgtgagatgtttattagtacacaggattcgctcaaatttggaattaatattgtgggtgaaatcctatcttctttaggcattccattcgttggaccaatagtcagcttctatactaaaattatcgatctattatggccgtcaagtggtggaaagaatccatggcaaatttttatggaacaagtggaaaaactcattgatcaaaaaatagaagaatacgcaaaaaataaagcacttgcagaattagaaggactaggagcgaattttgaattatatcgagtggcacttgaagaatggagagaaaacccaaatatctctagaaccacaaggggtgttcgtactcgctttgaaatccttgatggtttatttacacagtatatgccatcttttaaagtatcaggccatgaagtcccattacttacagtatatgcacaggcagcgagcctccatttacttttattaaaagacgtttcaatttttggcgaagaatggggactatctacagccgttataaacaactattataaacgtcaaataaatcttacagctcaatattctgatcattgtgtaaattggtataacgcgggtttagatagattaaaaggttcaaatgctaaaagttggttaaactatcaccgttttcgtagagaaatgacattgatggtattagatttagtagcattatatccaagttttgatgcgcgtacatatccaat

SEQ ID NO: 18 - protein, 296 aa, Bacillus sp.
  misc_feature: SGI Peptide ID NO. SG1METT47244
  misc_feature: SGI cDNA ID NO. AGRMET1T218621
  misc_feature (71)..(293): Pfam Id: PF03945 Pfam Desc: delta endotoxin, N-terminal domain
  misc_feature (48)..(296): NCBI GI: 228911986 Blast Desc: Pesticidal crystal protein cry8Ba [Bacillus thuringiensis IBL 200] gi|228847641|gb|EEM92570.1| Pesticidal crystal protein cry8Ba [Bacillus thuringiensis IBL 200]
  misc_feature (1)..(296): NCBI GI: 194272337 Blast Desc: delta-endotoxin [Bacillus thuringiensis]
  misc_feature (1)..(296): NCBI GI: 158021542 Blast Desc: crystal protein [Bacillus thuringiensis]
  misc_feature (1)..(296): NCBI GI: 34495248 Blast Desc: Cry8Ea1 [Bacillus thuringiensis]
  misc_feature (1)..(296): NCBI GI: 67973231 Blast Desc: Cry8 [Bacillus thuringiensis]
  misc_feature (1)..(296): NCBI GI: 347810686 Blast Desc: CryIII crystal toxin protein [Bacillus thuringiensis]
  misc_feature (4)..(296): NCBI GI: 78191077 Blast Desc: Snun8-1 [Bacillus thuringiensis]
  misc_feature (1)..(296): NCBI GI: 8928019 Blast Desc: CR8BA_BACUK RecName: Full=Pesticidal crystal protein cry8Ba; AltName: Full=134 kDa crystal protein; AltName: Full=Crystaline entomocidal protoxin; AltName: Full=Insecticidal
  misc_feature (64)..(296): NCBI GI: 203282538 Blast Desc: CR8BA_BACUK RecName: Full=Pesticidal crystal protein cry8Ba; AltName: Full=134 kDa crystal protein; AltName: Full=Crystaline entomocidal protoxin; AltName: Full=Insecticidal
  misc_feature (1)..(296): NCBI GI: 158021540 Blast Desc: insecticidal crystal protein [Bacillus thuringiensis]
  misc_feature: Useful for conferring pesticidal activity to an organism
  misc_feature: Useful for controlling a pest organism
MNSNDENKHNTLSNSSDQSASSNSESFSLANNQTNALQIENDIDYLRVSEETENEVLPNREMFISTQDSLKFGINIVGEILSSLGIPFVGPIVSFYTKIIDLLWPSSGGKNPWQIFMEQVEKLIDQKIEEYAKNKALAELEGLGANFELYRVALEEWRENPNISRTTRGVRTRFEILDGLFTQYMPSFKVSGHEVPLLTVYAQAASLHLLLLKDVSIFGEEWGLSTAVINNYYKRQINLTAQYSDHCVNWYNAGLDRLKGSNAKSWLNYHRFRREMTLMVLDLVALYPSFDARTYP

SEQ ID NO: 19 - DNA, 797 bp, Bacillus sp.
  misc_feature: SGI cDNA ID NO. SG1METG47245
  misc_feature: Encodes the peptide sequence at SEQ ID NO 20
  misc_feature: Useful for conferring pesticidal activity to an organism
  misc_feature: Useful for controlling a pest organism
aaccaacaaacgaagaaaacaatatcaaaaaaagtcatggcaaggttagcggtaggagcaatgagtctatctatctgggctcctgtaagtgaagcagctccagataataatcgatattattctattcatttgaaagctgatccgagattagcttgggatgtagctggaaattctggtgataataatagagcgattgttctatgggatggagcccgtggtgacaatgaacaatttgtatttttcccacttgatggaggagcatatgcaatcgtaaataaaaatagtggaaaacctgtaacatttggtggggcttctgctacctatggtaatcgcaaggcattgctttgggatggacctttgcgacaaacgagttggactggtgccgctaatgaacaatggtatttacgagacaagggatataataattacgaaattgtgaaccaagggaatcagaaagttgcatcttatgcgtatacgtgggcatcagaacatgtagagtttgtagatctggatgaagcaaatccttctgattcaaataaggtatttaacattgctaagaatccacttgaagcatcaggtttaccatctccattcccaggttttgattacgatactttttcattaccaactttaccagctataggaagtcgaccaaaagttccagagtataataatagtggacctattgatcaagaattacctgaaaaaacagagtctgctgttgttggagcatctttaataccttgtattatggtaaatgataatcaagcgagtgattatacaaaaatacacaattc

SEQ ID NO: 20 - protein, 265 aa, Bacillus sp.
  misc_feature: SGI Peptide ID NO. SG1METT47245
  misc_feature (209)..(264): Pfam Id: PF05431 Pfam Desc: Insecticidal Crystal Toxin, P42
  misc_feature (13)..(265): NCBI GI: 229100569 Blast Desc: 41.9 kDa insecticidal toxin [Bacillus cereus Rock3-29] gi|229106953|ref|ZP_04237053.1| 41.9 kDa insecticidal toxin [Bacillus cereus Rock3-28] gi|229119132|ref|ZP_04248459.1| 41.9
  misc_feature (40)..(256): NCBI GI: 229170564 Blast Desc: 41.9 kDa insecticidal toxin [Bacillus cereus AH621] gi|228612913|gb|EEK70090.1| 41.9 kDa insecticidal toxin [Bacillus cereus AH621]
  misc_feature (27)..(152): NCBI GI: 304408056 Blast Desc: Glucan endo-1,6-beta-glucosidase [Paenibacillus curdlanolyticus YK9] gi|304343075|gb|EFM08919.1| Glucan endo-1,6-beta-glucosidase [Paenibacillus curdlanolyticus YK9]
  misc_feature (42)..(157): NCBI GI: 254787846 Blast Desc: glycoside hydrolase family 16 domain protein [Teredinibacter turnerae T7901] gi|237683939|gb|ACR11203.1| glycoside hydrolase family 16 domain protein [Teredinibacter
  misc_feature (22)..(143): NCBI GI: 154488187 Blast Desc: BIFADO_01759 [Bifidobacterium adolescentis L2-32] gi|154083660|gb|EDN82705.1| BIFADO_01759 [Bifidobacterium adolescentis L2-32]
  misc_feature (49)..(145): NCBI GI: 149917126 Blast Desc: alpha-glucosidase [Plesiocystis pacifica SIR-1] gi|149822042|gb|EDM81435.1| alpha-glucosidase [Plesiocystis pacifica SIR-1]
  misc_feature (35)..(152): NCBI GI: 303238965 Blast Desc: Ricin B lectin [Acetivibrio cellulolyticus CD2] gi|302593598|gb|EFL63315.1| Ricin B lectin [Acetivibrio cellulolyticus CD2]
  misc_feature (53)..(153): NCBI GI: 13346881 Blast Desc: beta-mannanase [Sorangium cellulosum]
  misc_feature (39)..(136): NCBI GI: 256424645 Blast Desc: Ricin B lectin [Chitinophaga pinensis DSM 2588] gi|256039553|gb|ACU63097.1| Ricin B lectin [Chitinophaga pinensis DSM 2588]
  misc_feature: Useful for conferring pesticidal activity to an organism
  misc_feature: Useful for controlling a pest organism
NQQTKKTISKKVMARLAVGAMSLSIWAPVSEAAPDNNRYYSIHLKADPRLAWDVAGNSGDNNRAIVLWDGARGDNEQFVFFPLDGGAYAIVNKNSGKPVTFGGASATYGNRKALLWDGPLRQTSWTGAANEQWYLRDKGYNNYEIVNQGNQKVASYAYTWASEHVEFVDLDEANPSDSNKVFNIAKNPLEASGLPSPFPGFDYDTFSLPTLPAIGSRPKVPEYNNSGPIDQELPEKTESAVVGASLIPCIMVNDNQASDYTKIHN

SEQ ID NO: 21 - DNA, 789 bp, Bacillus sp.
  misc_feature: SGI cDNA ID NO. SG1METG47248
  misc_feature: SGI cDNA ID NO. AGRMET1G165656
  misc_feature: Encodes the peptide sequence at SEQ ID NO 22
  misc_feature: Useful for conferring pesticidal activity to an organism
  misc_feature: Useful for controlling a pest organism
aataattatgaaattgtgaaccaaggaaatgggaaagtcccaacttatcaatggcagggatcactagctgataatgtagagtttttaaagatggataattcaaatccgtctgatgcagataaggtatttacactatttaacggtactgttaacttcttgggccagaatataacagtgtttaacgatactttttcagtaccaaacttaccagctacaggaaatagaccagatgctccaaattatactggaggtgttgatcaacaattacctcaaacttcaaattctgttgttgttggggcatctttaataccttgtattatggtaaatgataatcaagcgagtgattatacaaaaatacacaattcaccatattatactttggtaaaagaagaatattgggataaaacattttcagcagttattccagctggtttgactcgtaactattcatttaaaacaggtatgacttctgtagatcaacaaaagatgactgacacgctttctatgaagattggagcagattttggattgaaatttggagacgcaactgcatcaattaaatcagagatttcaagaacattacaaacagaaattagtacaacgaatacagaagcatcggaagaaacagttacaagtacggttataagtgaacctggtaaaacaacaggatatacagaatatcaactggcaacaaaatatacgttaaagagagcagatggctcaattgtttcagatccttgggttgtaaaaaacaataagatcacaatagcaagaaaaaatgcacaataa

SEQ ID NO: 22 - protein, 262 aa, Bacillus sp.
  misc_feature: SGI Peptide ID NO. SG1METT47248
  misc_feature: SGI Peptide ID NO. AGRMET1T165656
  misc_feature (67)..(255): Pfam Id: PF05431 Pfam Desc: Insecticidal Crystal Toxin, P42
  misc_feature (1)..(262): NCBI GI: 229100569 Blast Desc: 41.9 kDa insecticidal toxin [Bacillus cereus Rock3-29] gi|229106953|ref|ZP_04237053.1| 41.9 kDa insecticidal toxin [Bacillus cereus Rock3-28] gi|229119132|ref|ZP_04248459.1| 41.9
  misc_feature (64)..(258): NCBI GI: 228911944 Blast Desc: 41.9 kDa insecticidal toxin [Bacillus thuringiensis IBL 200] gi|228847693|gb|EEM92619.1| 41.9 kDa insecticidal toxin [Bacillus thuringiensis IBL 200]
  misc_feature (64)..(258): NCBI GI: 117318 Blast Desc: BINA2_BACSH RecName: Full=41.9 kDa insecticidal toxin; AltName: Full=Strain 2297 gi|40223|emb|CAA30074.1| protein product [Bacillus sphaericus] gi|4467365|emb|CAB37658.1| BinA
  misc_feature (64)..(258): NCBI GI: 3641861 Blast Desc: BinA4 protein [Bacillus sphaericus]
  misc_feature (64)..(258): NCBI GI: 2293380 Blast Desc: P42 component of the binary toxin [Bacillus sphaericus]
  misc_feature (64)..(258): NCBI GI: 112297518 Blast Desc: binary toxin A [Lysinibacillus sphaericus]
  misc_feature (64)..(258): NCBI GI: 169825568 Blast Desc: insecticidal toxin [Lysinibacillus sphaericus C3-41] gi|169828673|ref|YP_001698831.1| insecticidal toxin [Lysinibacillus sphaericus C3-41] RecName: Full=41.9 kDa toxin;
  misc_feature (64)..(258): NCBI GI: 117319 Blast Desc: BINA3_BACSH RecName: Full=41.9 kDa insecticidal toxin; AltName: Full=Strain IAB59 gi|40226|emb|CAA33087.1| protein product [Bacillus sphaericus]
  misc_feature (64)..(258): NCBI GI: 2293372 Blast Desc: P42 component of the binary toxin [Bacillus sphaericus] gi|2293374|emb|CAA73758.1| P42 component of the binary toxin [Bacillus sphaericus] gi|2293376|emb|CAA73759.1| P42
  misc_feature (64)..(258): NCBI GI: 166034389 Blast Desc: binary toxin A [Lysinibacillus sphaericus]
  misc_feature: Useful for conferring pesticidal activity to an organism
  misc_feature: Useful for controlling a pest organism
NNYEIVNQGNGKVPTYQWQGSLADNVEFLKMDNSNPSDADKVFTLFNGTVNFLGQNITVFNDTFSVPNLPATGNRPDAPNYTGGVDQQLPQTSNSVVVGASLIPCIMVNDNQASDYTKIHNSPYYTLVKEEYWDKTFSAVIPAGLTRNYSFKTGMTSVDQQKMTDTLSMKIGADFGLKFGDATASIKSEISRTLQTEISTTNTEASEETVTSTVISEPGKTTGYTEYQLATKYTLKRADGSIVSDPWVVKNNKITIARKNAQ

SEQ ID NO: 23 - DNA, 1812 bp, Bacillus sp.
  misc_feature: SGI cDNA ID NO. SG1METG47249
  misc_feature: SGI cDNA ID NO. AGRMET1G697872
  misc_feature: Encodes the peptide sequence at SEQ ID NO 24
  misc_feature: Useful for conferring pesticidal activity to an organism
  misc_feature: Useful for controlling a pest organism
atgaattcgaataataaaactaaccctaatgtaataggcacttcatctgaccaatctttattaaccaattctgtaaaaaaacctttagcaaacgatcaaagcaatccattacaacaaagggattctaatgattgtttgagtgtgtctgagggaaatagagattctctgaatcatgatgtgtttattagtgccccaggtctagttgatactacagctaatattactagtgttatactgagtgctttaggtgtaccgatgttagggactgttgttaaattatatagtaaattatttggttttttatggggatcaacgccaggacaagatccatggaaagagctgatggatcgagtggaagtactcattgatcagaaattaacagaatacgcaagaagtaaagcattagcagaattggaaggattgcaaaatgttatgaagtcatatgtggatgcacttgaatcatggcaaaataattctcggaattcacaaacaagattattagtacaacagagattggttgttgcagattcccaatttaaacaggcaatgccttcctttgcaattaaagattatgaagtttcattattaccggtatatgcacaagctgcaaatcttcatttacttttattaagagatagccagattttcggaaaagattggggaatgcctcaacatgaaattgatcttttttataaagaacacttagagtgcatagaaaaatattctgaccattgtgtggaatggtatcatactggcttaaataaacttaaaagttcaactgctaaggattgggttgactacaatcgtttccgaagagaaatgacagtggcagttttagatatcgttgctttacttcctaattatgatgtacatatgtatccaatgccaatacatgcagaacttacacgggaaatttatacaaatccagtggggagttatttgccctacaaaggtaatttcaagaatgttatgtcttggtatgaaatgaaactttatcgccagcctacatttcatgatttagaaagcttaatccgaaagcctagtcagtttacttggctaaaagatcttaagatgtatacaaggaaaagacaaaatgggaaatatgagtattataattattgggtaggacatcagttaaagagagcgttaattggtgaagaatacagaagagaaacaacaattagtggtgaaattactagtgaagaagatacatttacttttgaagattatgatattcatagggttttatgcaattatatagggagatacgataatagtttggtgggggtaaatcaagttgagtttcattatctcgataacaatacacctcggaagaaggaatataaaaaagatattcgggttacgagtcaatcacaaaaaataattgactcagaagaggaattacatagtcatagattaagttatgttgaatcttttgatttatattggaatcataacaatgagaaaggagggacaatacccgtatttggttggacacatcatagtgtagcccctaaaaatataattcatgaggataagattacagtaatctcagctactaaagctactggttatttcacttctgaagttatacaaggtcctggatattcaggaggggatttaatacaaggatctgggtccatgggaagtattcccattactccacctcgtaatgcatataacaaaaaatatcatttgagagttcgctatgccgctgattttaatggattacttacaatgacttttacctctagtagtggaccaggtacagttaagataaactttaatgctacaatgaaaaaaggccattaa

SEQ ID NO: 24 - protein, 603 aa, Bacillus sp.
  misc_feature: SGI Peptide ID NO. SG1METT47249
  misc_feature: SGI cDNA ID NO. AGRMET1T697872
  misc_feature (69)..(291): Pfam Id: PF03945 Pfam Desc: delta endotoxin, N-terminal domain
  misc_feature (514)..(601): Pfam Id: PF03944 Pfam Desc: delta endotoxin
  misc_feature (299)..(503): Pfam Id: PF00555 Pfam Desc: delta endotoxin
  misc_feature (1)..(602): NCBI GI: 163943265 Blast Desc: Delta endotoxin central region subgroup 1 [Bacillus weihenstephanensis KBAB4] gi|163865462|gb|ABY46520.1| Delta endotoxin central region subgroup 1 [Bacillus weihenstephanensis
  misc_feature (1)..(599): NCBI GI: 8469159 Blast Desc: CR8CA_BACTP RecName: Full=Pesticidal crystal protein cry8Ca; AltName: Full=130 kDa crystal protein; AltName: Full=Crystaline entomocidal protoxin; AltName: Full=Insecticidal
  misc_feature (1)..(599): NCBI GI: 41056817 Blast Desc: HBF-1 CryIII delta-endotoxin [Bacillus thuringiensis]
  misc_feature (1)..(599): NCBI GI: 283971011 Blast Desc: CryIII insecticidal crystal protein [Bacillus thuringiensis]
  misc_feature (1)..(599): NCBI GI: 194272339 Blast Desc: delta-endotoxin [Bacillus thuringiensis]
  misc_feature (1)..(580): NCBI GI: 302141260 Blast Desc: Cry8Ga4 [Bacillus thuringiensis]
  misc_feature (1)..(572): NCBI GI: 48727548 Blast Desc: crystal protein [Bacillus thuringiensis]
  misc_feature (1)..(572): NCBI GI: 83743080 Blast Desc: toxin pbt145-1 [Bacillus thuringiensis] gi|213958617|gb|ACJ54705.1| spherical crystal protein [Bacillus thuringiensis]
  misc_feature (4)..(572): NCBI GI: 78191081 Blast Desc: Hbf-18-1 [Bacillus thuringiensis]
  misc_feature (1)..(594): NCBI GI: 8928019 Blast Desc: CR8BA_BACUK RecName: Full=Pesticidal crystal protein cry8Ba; AltName: Full=134 kDa crystal protein; AltName: Full=Crystaline entomocidal protoxin; AltName: Full=Insecticidal
  misc_feature: Useful for conferring pesticidal activity to an organism
  misc_feature: Useful for controlling a pest organism
MNSNNKTNPNVIGTSSDQSLLTNSVKKPLANDQSNPLQQRDSNDCLSVSEGNRDSLNHDVFISAPGLVDTTANITSVILSALGVPMLGTVVKLYSKLFGFLWGSTPGQDPWKELMDRVEVLIDQKLTEYARSKALAELEGLQNVMKSYVDALESWQNNSRNSQTRLLVQQRLVVADSQFKQAMPSFAIKDYEVSLLPVYAQAANLHLLLLRDSQIFGKDWGMPQHEIDLFYKEHLECIEKYSDHCVEWYHTGLNKLKSSTAKDWVDYNRFRREMTVAVLDIVALLPNYDVHMYPMPIHAELTREIYTNPVGSYLPYKGNFKNVMSWYEMKLYRQPTFHDLESLIRKPSQFTWLKDLKMYTRKRQNGKYEYYNYWVGHQLKRALIGEEYRRETTISGEITSEEDTFTFEDYDIHRVLCNYIGRYDNSLVGVNQVEFHYLDNNTPRKKEYKKDIRVTSQSQKIIDSEEELHSHRLSYVESFDLYWNHNNEKGGTIPVFGWTHHSVAPKNIIHEDKITVISATKATGYFTSEVIQGPGYSGGDLIQGSGSMGSIPITPPRNAYNKKYHLRVRYAADFNGLLTMTFTSSSGPGTVKINFNATMKKGH

SEQ ID NO: 25 - DNA, 1992 bp, Bacillus sp.
  misc_feature: SGI cDNA ID NO. SG1METG47256
  misc_feature: SGI cDNA ID NO. AGRMET1G167121
  misc_feature: Encodes the peptide sequence at SEQ ID NO 26
  misc_feature: Useful for conferring pesticidal activity to an organism
  misc_feature: Useful for controlling a pest organism
gtgaaaaagatgaattcaaataaaaatgattatgaaacattggaggcttcacaaaataacgctactacctctaattattatccaaggtacccactagcaaaggatccacaaaatacaaattataaagaatggctaaatatgtgtaattcaaacacacaatttgttggtaatataaacaattattctagtcctgaagctactttaagtgtacaagatgccattttcacgagtattagcactattttgcagttactttcgaatattggagttcctggagtcggaattattgctgaaataataaatctattatggagtcagtttggtccagacccatggagagacctaatggttcttgttgaagagcttattaatcaaagaataaatgaggaggtaagaagaacttctcttgaagaattaggagctttacaaggaattatggctctatatctaactagattgaacgcatggaaagataatgataccattcaaacacgagatgcaatacggtcgcagtatcgagtagttgataacttctttatattcaatatgtcaaggttcggacgcgaagaccatggtgttttattgttatcagtatatgcacaagccgcaaatttacatttaatgttattaagagatgctgatgtatttggagaagggtggggattaggccctgatgaaattcgtgataattatatcaggctacaaggactaattagaagatataaagatcattgtgtaactttctataatcgtggtttaaatcaatttaatcgttcaagtgctcaagattggattagatttaataggtttcgtagagatatgacattagcagtattggatctcgcaacattatttccaaactatgatccgcgtagatatccattggcagtaaaaacagaattgactagggagatttatacagatttagtaggaaataatacgtttgccccttggtatgatcctactattacatcttttgctactatagaaaatagcgcaatacgacgaccttcttttaccacttggcttaatcgtattcgagtgtttacaggtagactagatcctaggtttagtccggcttatatttggggagggcatgaattggttgaaaatggaaataatggttctgaaataacgcatagatttggtgatactgattctcttacccctattcaacatttatctttcgcgaatgtttctgttttcagtattaattcacgtgctcaatcagatacacaagcagctcaaagaaattatggagtttcgagagttacttttagtacatcaaatgtaaataatgcgccaggatctttgacatacgatgtgccaaatgttaacaactttcaatctatagtatcagagttgccaggagaaattgagcaaagaccagacgcaaaagattttagccataggttgtcctatatatcacattttattgcacgacgaagcagtttaggggggaatattaaccttttaacgtatggttggacacataccagtatggatcgtcataatcgtcttgaaccggataaaattactcaaatagatgctgttaaaggttggggagaggggagtgtcataccaggacctactggagggaatttggtacgaatagttggaagtcatccttttccctattatattagagttcaagcaccacaaacacaaacaaattatcgtattcgtttgcgttatgcttgtttaggcgagggttggggtaaagcgtgggtatctcacagtaacgagtctcattttgttgaattcccttgcgatggcgcatcaggtggttcatcagacactctgctagaaagtaattttcgctatattgagttgccagggatttttacgccagcaataaatcctgaaataaggattacacctagcagttctcccctcgtggtggacagatttgaatttatcccacttggcacttttgcaaatcaatcattagaaaaaaaggaaaaggccgtgaatgatttatttataaattaa

SEQ ID NO: 26 - protein, 663 aa, Bacillus sp.
  misc_feature: SGI Peptide ID NO. SG1METT47256
  misc_feature: SGI Peptide ID NO. AGRMET1T167121
  misc_feature (76)..(291): Pfam Id: PF03945 Pfam Desc: delta endotoxin, N-terminal domain
  misc_feature (512)..(642): Pfam Id: PF03944 Pfam Desc: delta endotoxin
  misc_feature (297)..(502): Pfam Id: PF00555 Pfam Desc: delta endotoxin
  misc_feature (7)..(663): NCBI GI: 48727548 Blast Desc: crystal protein [Bacillus thuringiensis]
  misc_feature (7)..(663): NCBI GI: 83743080 Blast Desc: toxin pbt145-1 [Bacillus thuringiensis] gi|213958617|gb|ACJ54705.1| spherical crystal protein [Bacillus thuringiensis]
  misc_feature (7)..(663): NCBI GI: 78191077 Blast Desc: Snun8-1 [Bacillus thuringiensis]
  misc_feature (7)..(663): NCBI GI: 34495248 Blast Desc: Cry8Ea1 [Bacillus thuringiensis]
  misc_feature (7)..(663): NCBI GI: 158021542 Blast Desc: crystal protein [Bacillus thuringiensis]
  misc_feature (7)..(663): NCBI GI: 67973231 Blast Desc: Cry8 [Bacillus thuringiensis]
  misc_feature (7)..(663): NCBI GI: 78191079 Blast Desc: Snun8-2 [Bacillus thuringiensis]
  misc_feature (7)..(663): NCBI GI: 49035989 Blast Desc: Cry8X [Bacillus thuringiensis]
  misc_feature (7)..(663): NCBI GI: 307697880 Blast Desc: insecticidal crystal protein [Bacillus thuringiensis]
  misc_feature (7)..(663): NCBI GI: 8928019 Blast Desc: CR8BA_BACUK RecName: Full=Pesticidal crystal protein cry8Ba; AltName: Full=134 kDa crystal protein; AltName: Full=Crystaline entomocidal protoxin; AltName: Full=Insecticidal
  misc_feature: Useful for conferring pesticidal activity to an organism
  misc_feature: Useful for controlling a pest organism
MKKMNSNKNDYETLEASQNNATTSNYYPRYPLAKDPQNTNYKEWLNMCNSNTQFVGNINNYSSPEATLSVQDAIFTSISTILQLLSNIGVPGVGIIAEIINLLWSQFGPDPWRDLMVLVEELINQRINEEVRRTSLEELGALQGIMALYLTRLNAWKDNDTIQTRDAIRSQYRVVDNFFIFNMSRFGREDHGVLLLSVYAQAANLHLMLLRDADVFGEGWGLGPDEIRDNYIRLQGLIRRYKDHCVTFYNRGLNQFNRSSAQDWIRFNRFRRDMTLAVLDLATLFPNYDPRRYPLAVKTELTREIYTDLVGNNTFAPWYDPTITSFATIENSAIRRPSFTTWLNRIRVFTGRLDPRFSPAYIWGGHELVENGNNGSEITHRFGDTDSLTPIQHLSFANVSVFSINSRAQSDTQAAQRNYGVSRVTFSTSNVNNAPGSLTYDVPNVNNFQSIVSELPGEIEQRPDAKDFSHRLSYISHFIARRSSLGGNINLLTYGWTHTSMDRHNRLEPDKITQIDAVKGWGEGSVIPGPTGGNLVRIVGSHPFPYYIRVQAPQTQTNYRIRLRYACLGEGWGKAWVSHSNESHFVEFPCDGASGGSSDTLLESNFRYIELPGIFTPAINPEIRITPSSSPLVVDRFEFIPLGTFANQSLEKKEKAVNDLFIN

SEQ ID NO: 27 - DNA, 1533 bp, Bacillus sp.
  misc_feature: SGI cDNA ID NO. SG1METG47260
  misc_feature: SGI cDNA ID NO. AGRMET1G167125
  misc_feature: Encodes the peptide sequence at SEQ ID NO 28
  misc_feature: Useful for conferring pesticidal activity to an organism
  misc_feature: Useful for controlling a pest organism
atgggtacagatcaaaatagaaatgaatatgaaatactagattcttcatcctatcatgagtatacatcaaacagatatccttttgcgcagaatccagtcattatggaaaacaccaattataaagatattaatccttcttttattggcagtgcattgggtagcatattcaatatctttcaactatatgcttctttttttcaaacaccttctgtgttaaatggaatagggcttatagagggtattataagtagaatactaaattttcaagtaataaatcttactataaatgatgtccaacaacttattgatcaaacattagaaaatcatatcagaactgaggcaaaccaaagatttaatagcatacaagccaattttaatcaatatctttccaataaaagtctctatataaataatccttcggattcaacccgaagactatttgtaaatagccttagtgcaaatgagcgtgatttgagaatagcactagatgttacttttagcttggcaaatcgagagatattattattgcccaactttacccagatcgcaatgttacatttaacaatattaaaagatgctgtaatgtttaatggtcctgacttaatagcacctacggttagtgaagcatctgagaattctattttgaatcgcccccctagtgattcgtataaatctgcacttttaactagtatatctatgtatactaattattgcgtaagacactataatgaaggtttaaatcgcataagaaacaggggtacatctagtaatatttggttgaattttcatagttttcgtagagaaatgacattaacagtattagattttgtcgcattgttttcattttttgatacaactaaatatccagcatcaaaaaaatttacaccaccagtagtttctcagttaagtagggtgatttatacggacccagtaggtgctataagaaccgacggtcgtgggtggttcgatccgcccgtaggaactgataggattagggttaattttgcatcaatagaaaatgaaataccggcccctactacttctcggcatttatcggaattaacaatttcttcaggtccgcttggttttggcataaatccaagtaggacacattcgtggcagggtaatcgaaatgttaatatattcgctcctgctgatgtttctggagtaatttctaatcggacgcaaactattcctgctagaaatattttcagagtggattcacgtgtttatactcttgattggaggttgtatggagtttatagagctgaattttttcagggtgctagtcaaaattctcaaagacgtgtatttgcggaaaatcctccaacaggtgctggtgcccaaagtgcaaataactttcgatttttacctggagaaaattcggatacaccaactccgcagaattatactcatttattaagtagagtagtaaatgcaactgtaggacttacaccggcaacaggaaatcaacgtaattctgtattgatatttggttggacacataaaagtttaacctctgaaaatatatag

SEQ ID NO: 28 - protein, 510 aa, Bacillus sp.
  misc_feature: SGI Peptide ID NO. SG1METT47260
  misc_feature: SGI Peptide ID NO. AGRMET1T167125
  misc_feature (56)..(286): Pfam Id: PF03945 Pfam Desc: delta endotoxin, N-terminal domain
  misc_feature (299)..(505): Pfam Id: PF00555 Pfam Desc: delta endotoxin
  misc_feature (6)..(509): NCBI GI: 48880 Blast Desc: crystal protein [Bacillus thuringiensis]
  misc_feature (6)..(509): NCBI GI: 8469164 Blast Desc: CR9AA_BACTG RecName: Full=Pesticidal crystal protein cry9Aa; AltName: Full=130 kDa crystal protein; AltName: Full=Crystaline entomocidal protoxin; AltName: Full=Insecticidal
  misc_feature (1)..(510): NCBI GI: 239638225 Blast Desc: cry4 delta-toxin-like protein [Bacillus thuringiensis]
  misc_feature (5)..(510): NCBI GI: 50539655 Blast Desc: delta-endotoxin [Bacillus thuringiensis]
  misc_feature (1)..(509): NCBI GI: 193089942 Blast Desc: toxin protein [Bacillus thuringiensis]
  misc_feature (1)..(509): NCBI GI: 8928012 Blast Desc: C24AA_BACTJ RecName: Full=Pesticidal crystal protein cry24Aa; AltName: Full=Crystaline entomocidal protoxin; Short=Crystal protein; AltName: Full=Insecticidal delta-endotoxin
  misc_feature (1)..(509): NCBI GI: 242693276 Blast Desc: Cry20-like delta endotoxin [Bacillus thuringiensis]
  misc_feature (5)..(510): NCBI GI: 134274695 Blast Desc: pesticidal crystal protein cry24-like [Bacillus thuringiensis]
  misc_feature (5)..(345): NCBI GI: 8928013 Blast Desc: C25AA_BACTJ RecName: Full=Pesticidal crystal protein cry25Aa; AltName: Full=76 kDa crystal protein; AltName: Full=Crystaline entomocidal protoxin; AltName: Full=Insecticidal
  misc_feature (7)..(509): NCBI GI: 8928008 Blast Desc: C20AA_BACUF RecName: Full=Pesticidal crystal protein cry20Aa; AltName: Full=86 kDa crystal protein; AltName: Full=Crystaline entomocidal protoxin; AltName: Full=Insecticidal
  misc_feature: Useful for conferring pesticidal activity to an organism
  misc_feature: Useful for controlling a pest organism
MGTDQNRNEYEILDSSSYHEYTSNRYPFAQNPVIMENTNYKDINPSFIGSALGSIFNIFQLYASFFQTPSVLNGIGLIEGIISRILNFQVINLTINDVQQLIDQTLENHIRTEANQRFNSIQANFNQYLSNKSLYINNPSDSTRRLFVNSLSANERDLRIALDVTFSLANREILLLPNFTQIAMLHLTILKDAVMFNGPDLIAPTVSEASENSILNRPPSDSYKSALLTSISMYTNYCVRHYNEGLNRIRNRGTSSNIWLNFHSFRREMTLTVLDFVALFSFFDTTKYPASKKFTPPVVSQLSRVIYTDPVGAIRTDGRGWFDPPVGTDRIRVNFASIENEIPAPTTSRHLSELTISSGPLGFGINPSRTHSWQGNRNVNIFAPADVSGVISNRTQTIPARNIFRVDSRVYTLDWRLYGVYRAEFFQGASQNSQRRVFAENPPTGAGAQSANNFRFLPGENSDTPTPQNYTHLLSRVVNATVGLTPATGNQRNSVLIFGWTHKSLTSENI

SEQ ID NO: 29 - DNA, 2118 bp, Bacillus sp.
  misc_feature: SGI cDNA ID NO. SG1METG47261
  misc_feature: SGI cDNA ID NO. AGRMET1G697773
  misc_feature: Encodes the peptide sequence at SEQ ID NO 30
  misc_feature: Useful for conferring pesticidal activity to an organism
  misc_feature: Useful for controlling a pest organism
agaatctactattcatcaaagccaaaatcatattttatttcatcaaattcacgatgcaaaagtacaagcaattttaatcaatatctttccaataaaagtctctatataaataatccttcggattcaacccgaagactatttgtaaatagccttagtgcaaatgagcgtgatttgagaatagcactagatgttacttttagcttggcaaatcgagagatattattattgcccaactttacccagatcgcaatgttacatttaacaatattaaaagatgctgtaatgtttaatggtcctgacttaatagcacctacggttagtgaagcatctgagaattctattttgaatcgcccccctagtgattcgtataaatctgcacttttaactagtatatctatgtatactaattattgcgtaagacactataatgaaggtttaaatcgcataagaaacaggggtacatctagtaatatttggttgaattttcatagttttcgtagagaaatgacattaacagtattagattttgtcgcattgttttcattttttgatacaactaaatatccagcatcaaaaaaatttacaccaccagtagtttctcagttaagtagggtgatttatacggacccagtaggtgctataagaaccgacggtcgtgggtggttcgatccgcccgtaggaactgataggattagggttaattttgcatcaatagaaaatgaaataccggcccctactacttctcggcatttatcggaattaacaatttcttcaggtccgcttggttttggcataaatccaagtaggacacattcgtggcagggtaatcgaaatgttaatatattcgctcctgctgatgtttctggagtaatttctaatcggacgcaaactattcctgctagaaatattttcagagtggattcacgtgtttatactcttgattggaggttgtatggagtttatagagctgaattttttcagggtgctagtcaaaattctcaaagacgtgtatttgcggaaaatcctccaacaggtgctggtgcccaaagtgcaaataactttcgatttttacctggagaaaattcggatacaccaactccgcagaattatactcatttattaagtagagtagtaaatgcaactgtaggacttacaccggcaacaggaaatcaacgtaattctgtattgatatttggttggatacataaaagtttaacctctgaaaatatatatagaatcaacgaaattacgcaagtagccgctgtgaatgcaagaagtaattcgggtattcaggtaatttcaggacctggatttacaggtggagatttagtaagaatggaccctaatggtagcgtaagttacaattttacacctgctaatcagcaagcaggacaatcaaatctagcaatacgtttacgttatgctagtcaaggtaccgcttcattaagaataacgtttggcaatggttctagccaagtgattccacttgatgctacaacttcatcaataaataatcttcaatatgaagatcttcgctttgttgatattccaaataatgttagttctctaccgactggtacatcaatgaccattcaaaatataagtacaaactctaacgtagtactagataaagttgaacttttttccgacatacctattcccatttccgaagaaccaattattattccagggatttatcaaattgtaacatccttagataatagtagtgtagtagatttacatgtggatacaaataatattacattatggtcgaataatgaaaggactactcaactttggaattttacgtatgaccaatcaagaagtgcatatgtaatacgtagcgtacgtaatccaggtttagtcttagcgtgggatgttccgagtattgacagaaatgtatttgctacaccatttgttccaggtcaggatgaatattattggatgatagaacgctttgaaggtggatatatacttaaaaatatggggaatcctaattttttactaactgcatatggagaaggaactacaaacggtgcgaatattacggtaaatcaaagacacaatgtaaataattcatataaatctggccaaatattttttttaagaagaacttaa

SEQ ID NO: 30 - protein, 705 aa, Bacillus sp.
  misc_feature: SGI Peptide ID NO. SG1METT47261
  misc_feature: SGI Peptide ID NO. AGRMET1T697773
  misc_feature (21)..(186): Pfam Id: PF03945 Pfam Desc: delta endotoxin, N-terminal domain
  misc_feature (416)..(547): Pfam Id: PF03944 Pfam Desc: delta endotoxin
  misc_feature (199)..(405): Pfam Id: PF00555 Pfam Desc: delta endotoxin
  misc_feature (577)..(689): Pfam Id: PF00652 Pfam Desc: Ricin-type beta-trefoil lectin domain
  misc_feature (65)..(572): NCBI GI: 8469164 Blast Desc: CR9AA_BACTG RecName: Full=Pesticidal crystal protein cry9Aa; AltName: Full=130 kDa crystal protein; AltName: Full=Crystaline entomocidal protoxin; AltName: Full=Insecticidal
  misc_feature (65)..(572): NCBI GI: 48880 Blast Desc: crystal protein [Bacillus thuringiensis]
  misc_feature (62)..(568): NCBI GI: 50539655 Blast Desc: delta-endotoxin [Bacillus thuringiensis]
  misc_feature (66)..(548): NCBI GI: 239638225 Blast Desc: cry4 delta-toxin-like protein [Bacillus thuringiensis]
  misc_feature (25)..(553): NCBI GI: 22213635 Blast Desc: CryIBII [Bacillus thuringiensis]
  misc_feature (25)..(553): NCBI GI: 8469153 Blast Desc: CR1BD_BACTZ RecName: Full=Pesticidal crystal protein cry1Bd; AltName: Full=140 kDa crystal protein; AltName: Full=Crystaline entomocidal protoxin; AltName: Full=Insecticidal
  misc_feature (47)..(550): NCBI GI: 134274695 Blast Desc: pesticidal crystal protein cry24-like [Bacillus thuringiensis]
  misc_feature (25)..(611): NCBI GI: 315076091 Blast Desc: insecticidal crystal protein DIG-3 [Bacillus thuringiensis]
  misc_feature (55)..(556): NCBI GI: 8928012 Blast Desc: C24AA_BACTJ RecName: Full=Pesticidal crystal protein cry24Aa; AltName: Full=Crystaline entomocidal protoxin; Short=Crystal protein; AltName: Full=Insecticidal delta-endotoxin
  misc_feature (50)..(558): NCBI GI: 8928013 Blast Desc: C25AA_BACTJ RecName: Full=Pesticidal crystal protein cry25Aa; AltName: Full=76 kDa crystal protein; AltName: Full=Crystaline entomocidal protoxin; AltName: Full=Insecticidal
  misc_feature: Useful for conferring pesticidal activity to an organism
  misc_feature: Useful for controlling a pest organism
RIYYSSKPKSYFISSNSRCKSTSNFNQYLSNKSLYINNPSDSTRRLFVNSLSANERDLRIALDVTFSLANREILLLPNFTQIAMLHLTILKDAVMFNGPDLIAPTVSEASENSILNRPPSDSYKSALLTSISMYTNYCVRHYNEGLNRIRNRGTSSNIWLNFHSFRREMTLTVLDFVALFSFFDTTKYPASKKFTPPVVSQLSRVIYTDPVGAIRTDGRGWFDPPVGTDRIRVNFASIENEIPAPTTSRHLSELTISSGPLGFGINPSRTHSWQGNRNVNIFAPADVSGVISNRTQTIPARNIFRVDSRVYTLDWRLYGVYRAEFFQGASQNSQRRVFAENPPTGAGAQSANNFRFLPGENSDTPTPQNYTHLLSRVVNATVGLTPATGNQRNSVLIFGWIHKSLTSENIYRINEITQVAAVNARSNSGIQVISGPGFTGGDLVRMDPNGSVSYNFTPANQQAGQSNLAIRLRYASQGTASLRITFGNGSSQVIPLDATTSSINNLQYEDLRFVDIPNNVSSLPTGTSMTIQNISTNSNVVLDKVELFSDIPIPISEEPIIIPGIYQIVTSLDNSSVVDLHVDTNNITLWSNNERTTQLWNFTYDQSRSAYVIRSVRNPGLVLAWDVPSIDRNVFATPFVPGQDEYYWMIERFEGGYILKNMGNPNFLLTAYGEGTTNGANITVNQRHNVNNSYKSGQIFFLRRT

SEQ ID NO: 31 - DNA, 2040 bp, Bacillus sp.
  misc_feature: SGI cDNA ID NO. SG1METG47263
  misc_feature: SGI cDNA ID NO. AGRMET1G200365
  misc_feature: Encodes the peptide sequence at SEQ ID NO 32
  misc_feature: Useful for conferring pesticidal activity to an organism
  misc_feature: Useful for controlling a pest organism
atgaatcaaaattccaataacaatgaaaatgaaatcatggatactggttctcagccaaggcgctcccttgcgcaggcaccagtttctgaattccaagggatgaatacatgctcaacaggagaacagagttcctctgttcgtcaacaggaagcagttacagacgctgcacttcaaactacatcagaagttacccaaacgcttataaatgccgggaataccgccggcacttttggaaaatcatcatgggagatagcaggcggggttctttcatctatcattaaaatattatggaggactactgaaaatcaaaaacaatgggacgagatgatcgaagcagtagaaattcttattaaaaaagcgctaaataaacaactgcatgacacagcaatagctcaattagagggattacaaaatgtggtgaatagatatataaaatcgctagatgatttacacgcagaccctacgaatctggctttgcaagaagaagtacgtactaggtggagcgaagctgatagcgcttttataattgccataccacaatttagacctggcgctacaggaggggaatctcaaattctattactcgctgtttatgcgcaagcagcgaaccttcacttgctgttattacgagatgctgtgcagtttggagcgcaatgggggatggacccagctacaattgaaaccaattatggtgtactcctagaaagacagaatgaatatagcaatcattgcgtgaatacgtacaacagtggattagaacaatcccgaaacttacaagcagatttatctaactatgatcagtacccatggacacgagataatcaatcagcttattctatgttccgtgatgccaaaggagaatatagaggtacagaaaattggaatttatataatagattccgaaaagagatgaccctgatggcattagatattacttccttctggtcactatataatccatattactacccatttccagttaaaactgaactaacacgagaattattcacagatatcagaggaacaacttggagaaaagataacaatataaatacgatagatggtatagaggcccgtatggtgggaaatcgaaacgaacaattatttacttggttaaaacagatgaatttttatatgaaatatatgggaagtaatagtagtaccactcatggtgatcttatggtaggtttggaaaaaacagtgcaaacaacttttggtccagatcaaaaacttccggtagaagggcagaatacaaattatgatagcgttcaacgccctggagttattattccagaattttattggaatgttgcggaaactaaacagtggtttgaaacaagacgactaacattaagggtaagtactggtggcgtatcagcagacttgggaacggtagattttgaactttgggaccgcaatcacagtggctaccgagcgtatatatatgacgcaagtcatagatcaaattctattaaggatcatcgattatcatgggtgaaatttgagcctgtatatcagggctgcccttttgtatggtctaatgagagacaactaagtgctttattatttggttggacacacaacagtgtcgatccaaacaatattatagcctcggataaaatcactcaaattcccgcggtgaagggatatattgaagggaatggtaccacagttgtaagaggacctggtagcaccggtggcaatcttgtaaaacttcctacggcccaggaagtgccacaatttcaaatcgcggtaagaccatcatcctccgcacgcgacagaccatatacaatacgtattcgctatgcaagtgaatccaatgcggttctatttgtaacgacatatgacgcttctaacggatggtgggatagtataagtcattttgctgaaaaaacattttctggaaatatagcctattcctctttcggatacttgaatacaatcaatttttcaacaaatgaagaagagtttaaaatagggttaagttgcaataatggtggtcctatttttatcgatcaaatcgaattcgttccgcgttaa

SEQ ID NO: 32 - protein, 679 aa, Bacillus sp.
  misc_feature: SGI Peptide ID NO. SG1METT47263
  misc_feature: SGI Peptide ID NO. AGRMET1T200365
  misc_feature (72)..(320): Pfam Id: PF03945 Pfam Desc: delta endotoxin, N-terminal domain
  misc_feature (541)..(678): Pfam Id: PF03944 Pfam Desc: delta endotoxin
  misc_feature (327)..(531): Pfam Id: PF00555 Pfam Desc: delta endotoxin
  misc_feature (1)..(678): NCBI GI: 51090236 Blast Desc: cancer cell-killing Cry protein [Bacillus thuringiensis]
  misc_feature (1)..(678): NCBI GI: 51090228 Blast Desc: cancer cell-killing Cry protein parasporin-3 [Bacillus thuringiensis] gi|51090232|dbj|BAD35160.1| cancer cell-killing Cry protein parasporin-3 [Bacillus thuringiensis]
  misc_feature (1)..(677): NCBI GI: 228936898 Blast Desc: Cancer cell-killing Cry protein [Bacillus thuringiensis serovar andalousiensis BGSC 4AW1] gi|228822789|gb|EEM68667.1| Cancer cell-killing Cry protein BGSC
  misc_feature (85)..(678): NCBI GI: 228937265 Blast Desc: bthur0009_56320 [Bacillus thuringiensis serovar andalousiensis BGSC 4AW1] gi|228822406|gb|EEM68355.1| bthur0009_56320 [Bacillus thuringiensis serovar andalousiensis
  misc_feature (1)..(678): NCBI GI: 17385650 Blast Desc: crystal protein CryE6S [Bacillus thuringiensis]
  misc_feature (5)..(678): NCBI GI: 117324 Blast Desc: CR3BA_BACTO RecName: Full=Pesticidal crystal protein cry3Ba; AltName: Full=75 kDa crystal protein; AltName: Full=Crystaline entomocidal protoxin; AltName: Full=Insecticidal
  misc_feature (1)..(378): NCBI GI: 51090240 Blast Desc: Cry protein [Bacillus thuringiensis]
  misc_feature (62)..(678): NCBI GI: 70673280 Blast Desc: truncated insecticidal active protein Cry1Ab [Bacillus thuringiensis serovar tolworthi]
  misc_feature (5)..(678): NCBI GI: 8469155 Blast Desc: CR3BB_BACTU RecName: Full=Pesticidal crystal protein cry3Bb; AltName: Full=74 kDa crystal protein; AltName: Full=Crystaline entomocidal protoxin; AltName: Full=Insecticidal
  misc_feature (62)..(678): NCBI GI: 256259700 Blast Desc: insecticidal protein 1 [Bacillus thuringiensis]
  misc_feature: Useful for conferring pesticidal activity to an organism
  misc_feature: Useful for controlling a pest organism
MNQNSNNNENEIMDTGSQPRRSLAQAPVSEFQGMNTCSTGEQSSSVRQQEAVTDAALQTTSEVTQTLINAGNTAGTFGKSSWEIAGGVLSSIIKILWRTTENQKQWDEMIEAVEILIKKALNKQLHDTAIAQLEGLQNVVNRYIKSLDDLHADPTNLALQEEVRTRWSEADSAFIIAIPQFRPGATGGESQILLLAVYAQAANLHLLLLRDAVQFGAQWGMDPATIETNYGVLLERQNEYSNHCVNTYNSGLEQSRNLQADLSNYDQYPWTRDNQSAYSMFRDAKGEYRGTENWNLYNRFRKEMTLMALDITSFWSLYNPYYYPFPVKTELTRELFTDIRGTTWRKDNNINTIDGIEARMVGNRNEQLFTWLKQMNFYMKYMGSNSSTTHGDLMVGLEKTVQTTFGPDQKLPVEGQNTNYDSVQRPGVIIPEFYWNVAETKQWFETRRLTLRVSTGGVSADLGTVDFELWDRNHSGYRAYIYDASHRSNSIKDHRLSWVKFEPVYQGCPFVWSNERQLSALLFGWTHNSVDPNNIIASDKITQIPAVKGYIEGNGTTVVRGPGSTGGNLVKLPTAQEVPQFQIAVRPSSSARDRPYTIRIRYASESNAVLFVTTYDASNGWWDSISHFAEKTFSGNIAYSSFGYLNTINFSTNEEEFKIGLSCNNGGPIFIDQIEFVPR

SEQ ID NO: 33 - DNA, 2028 bp, Bacillus sp.
  misc_feature: SGI cDNA ID NO. SG1METG47265
  misc_feature: SGI cDNA ID NO. AGRMET1G218407
  misc_feature: Encodes the peptide sequence at SEQ ID NO 34
  misc_feature: Useful for conferring pesticidal activity to an organism
  misc_feature: Useful for controlling a pest organism
atgaaaaaaatagaaaacaatcttgtaaataaacgtaaatcggtggataaagtaccttctacttctgtatcaaatgcttctagcagatatcctttaacaaatgatcaaactactgtattacaaaataggaattataaagattttttgaaaataaatcatggagatggaagtaaggatttaccgaaccatgagttatttattagtgcaccaggtctagttgaagcgacagctaacattactagtactatactaagtgctttagggattccatttttaggaactatacttacagtgtatagcaaattatttgggttcttatggggatcaacttctgaacaagacccttggaaagaattaatggatcgagtagaaatacttattgatcaaaaattaacgcaatatgcgagagataaggcagaagcagaattagcagggttaaaaaatgttttaaattcgtacgtagctgcacttgaagcatggcaaaataattctcgagatttggatacaagatcattagtacaacagagatttgtggcagctgatgctcagtttaaaaatgcattgccttcatttgcaatcaaagagtatgaaacttcattattaccaatttatgcacaagccgcaaatcttcatttgcttttattgagggatagtcagattttcggggaagaatggggaatggaaccatatgaagttgatttattatataaagaacaattgaatcttatgggagaatatacagatcattgtaccaaatggtattatctcggtttagaaagactaaaagaaaaagatacaacagcaaaaggttgggtaaactacaatcgttttcgtcgagaaatgacattagcggttttggatattatctccttataccctcattatgatatatatatgtatccaatgaaaacaaacgcagaacttacgagggaaatttatacagatccaattggaagttatgtgactgaagatagtagtaattttcgaagggttatgtcttggtatgatatgagaccaccagttcttccaactttttcttatttagaaaaccttattagagtgcctgaactgtttacaattataaaaaaactgagtatgtatacaacaaaaaggaataacggtaaatatgaatactataattactgggtgggaactgaattagaacgttcctatattggtaacaaggataaaatagtaaaaacaaaaaatggaagtattactagtgaaaaagatacatttgattttaataattatgatatatacagagttttatgtaattacataggaagatatgagaatagtttattaggattgaatacagttaaattacatttaagtgataattcaaatcaaattgaaaaagaatacaataaacctttatttgttacggggggacagaaaatcattgattctaatgaagaattacctgtaacaaaaataacacatttgtcagacgatccgtcttacactcataaattaagctatgtttcatcttttgcattaagtacacaaaaaggaacagccttagggactattcctttatttggatggacacatcgtagtgtagaacataaaaacacactttcgcgtgaaaaaattatagagattcctgtagtcaaatcatcttatattcacccaaccacacaagttatacaagggcctggatttacagggggagatatagttaaaggagtgaaaaagggaaacgaatcaaataaacttttatttgttttaccttttgatgtagcatcaggaataagtagatcagaatatgatattagaatacgttatgcagctgacaacaaagggagattgcatatttcagaagggaatttcgttacaagaagcatagattttaataagtctatggaacctaattcaaaattgcaatacagttcgtttaaatatttaacaattccagggtgtagtttaggtataggtagtaaagatttaagtgtttatgggcaaggagataaaggggattatactatatatattgataaaatagaatttattccaaaagattaa

SEQ ID NO: 34 - protein, 675 aa, Bacillus sp.
  misc_feature: SGI Peptide ID NO. SG1METT47265
  misc_feature: SGI Peptide ID NO. AGRMET1T218407
  misc_feature (74)..(297): Pfam Id: PF03945 Pfam Desc: delta endotoxin, N-terminal domain
  misc_feature (533)..(675): Pfam Id: PF03944 Pfam Desc: delta endotoxin
  misc_feature (304)..(523): Pfam Id: PF00555 Pfam Desc: delta endotoxin
  misc_feature (27)..(673): NCBI GI: 163943265 Blast Desc: Delta endotoxin central region subgroup 1 [Bacillus weihenstephanensis KBAB4] gi|163865462|gb|ABY46520.1| Delta endotoxin central region subgroup 1 [Bacillus weihenstephanensis
  misc_feature (10)..(673): NCBI GI: 283971011 Blast Desc: CryIII insecticidal crystal protein [Bacillus thuringiensis]
  misc_feature (10)..(673): NCBI GI: 8469159 Blast Desc: CR8CA_BACTP RecName: Full=Pesticidal crystal protein cry8Ca; AltName: Full=130 kDa crystal protein; AltName: Full=Crystaline entomocidal protoxin; AltName: Full=Insecticidal
  misc_feature (10)..(673): NCBI GI: 41056817 Blast Desc: HBF-1 CryIII delta-endotoxin [Bacillus thuringiensis]
  misc_feature (10)..(673): NCBI GI: 194272339 Blast Desc: delta-endotoxin [Bacillus thuringiensis]
  misc_feature (10)..(675): NCBI GI: 302141260 Blast Desc: Cry8Ga4 [Bacillus thuringiensis]
  misc_feature (10)..(675): NCBI GI: 8928018 Blast Desc: CR8AA_BACUK RecName: Full=Pesticidal crystal protein cry8Aa; AltName: Full=131 kDa crystal protein; AltName: Full=Crystaline entomocidal protoxin; AltName: Full=Insecticidal
  misc_feature (10)..(675): NCBI GI: 158021540 Blast Desc: insecticidal crystal protein [Bacillus thuringiensis]
  misc_feature (10)..(675): NCBI GI: 8928019 Blast Desc: CR8BA_BACUK RecName: Full=Pesticidal crystal protein cry8Ba; AltName: Full=134 kDa crystal protein; AltName: Full=Crystaline entomocidal protoxin; AltName: Full=Insecticidal
  misc_feature (10)..(675): NCBI GI: 48727548 Blast Desc: crystal protein [Bacillus thuringiensis]
  misc_feature: Useful for conferring pesticidal activity to an organism
  misc_feature: Useful for controlling a pest organism
MKKIENNLVNKRKSVDKVPSTSVSNASSRYPLTNDQTTVLQNRNYKDFLKINHGDGSKDLPNHELFISAPGLVEATANITSTILSALGIPFLGTILTVYSKLFGFLWGSTSEQDPWKELMDRVEILIDQKLTQYARDKAEAELAGLKNVLNSYVAALEAWQNNSRDLDTRSLVQQRFVAADAQFKNALPSFAIKEYETSLLPIYAQAANLHLLLLRDSQIFGEEWGMEPYEVDLLYKEQLNLMGEYTDHCTKWYYLGLERLKEKDTTAKGWVNYNRFRREMTLAVLDIISLYPHYDIYMYPMKTNAELTREIYTDPIGSYVTEDSSNFRRVMSWYDMRPPVLPTFSYLENLIRVPELFTIIKKLSMYTTKRNNGKYEYYNYWVGTELERSYIGNKDKIVKTKNGSITSEKDTFDFNNYDIYRVLCNYIGRYENSLLGLNTVKLHLSDNSNQIEKEYNKPLFVTGGQKIIDSNEELPVTKITHLSDDPSYTHKLSYVSSFALSTQKGTALGTIPLFGWTHRSVEHKNTLSREKIIEIPVVKSSYIHPTTQVIQGPGFTGGDIVKGVKKGNESNKLLFVLPFDVASGISRSEYDIRIRYAADNKGRLHISEGNFVTRSIDFNKSMEPNSKLQYSSFKYLTIPGCSLGIGSKDLSVYGQGDKGDYTIYIDKIEFIPKD

SEQ ID NO: 35 - DNA, 1578 bp, Bacillus sp.
  misc_feature: SGI cDNA ID NO. SG1METG47269
  misc_feature: SGI cDNA ID NO. AGRMET1G218348
  misc_feature: Encodes the peptide sequence at SEQ ID NO 36
  misc_feature: Useful for conferring pesticidal activity to an organism
  misc_feature: Useful for controlling a pest organism
atggctcaatcagaatttaaccaaaatctacgggagcaagggcaatcacgtgcaagagttattattctacgtgtgaataatccgggatacaacactaatactttagacatcgcagacatagaagatatcattcatttacctcaagctatagagttagctaatgcatttcaatctgcactagtacctactacatccaacttcggggaggacacattaagatttgatgtagaaaggggattaggaatagctactcacgtttatcctagagctataaatgtgaattatgtaacacgtactttatcacaaactaataatcaagtacagtccatgataaataaggtgatagaagagcttaaatctttattaggaattaatctggctaattcagtgctacaacaattaaccactgtaattacagaaacttttacaaacctctacgtacaacagcaatctgcttggcttttttggggacgccaaacatcatcacaaaccaattatacttataatatcgtatttgcaatccaaaatgcccaaacaggtagttttatgaaagctattcctatagggtttgagatatctgcatatattgcaagggaacgcttattattttttaatattcaagattatgcaagctatagtgtcaaaatacacgcaattcaagttatgcagccattgattcatgagagttttcaacccctaagaggcatatttaatatcataacttccgtaaataatagaagtgctattcaaattactgaatattatgacgaaaatacacatgattatcctgttaagttatgggactataataatattattaatcaaaaatggattttagtttttaatcaaactacccgtgcttacagtattcaaaacctaatagctcgctatttagtactaacatgggattctactcctggatcaaataaagtttttgcttctactaatcgttggaacgattcacaattctggattcttgaaagtacagcagatggttccatttttttaacaaatatgaaagacactcaatttgtattagagatagaaaactctagtactactaatgggacaaatgttatagtcaatagaaaaaataataatgcacagcaaaaattttacttaaataaagtaaaccaagagtttcaggatggtgtatataagattaagactgccctaaacaatagtagcgttctgcagatgtctgaagattattttggttatacgtcagattactttgtgaaattatggaccaacaataataatgatattaaccaaaaatggatttttgaatttgatagcactaaatctgcgtatcaaattaaaagtcaaagggatccttccttagtactagcatggacttggagtgtacctactgttaaactccctattccaaataacgatgatcatctctggtttcttcaaaatgctgggtcgggtacctattattttgtaaatatgacagacacccgatatgttttagaagtggctagttctagtaccactaatggaacgatacttacaatcaataaacgaaacggaaatttaaatcaaaaatttttgttggacatgattaattaa

SEQ ID NO: 36 - protein, 525 aa, Bacillus sp.
  misc_feature: SGI Peptide ID NO. SG1METT47269
  misc_feature: SGI Peptide ID NO. AGRMET1T218348
  misc_feature (13)..(243): Pfam Id: PF01338 Pfam Desc: Bacillus thuringiensis toxin
  misc_feature (240)..(372): Pfam Id: PF00652 Pfam Desc: Ricin-type beta-trefoil lectin domain
  misc_feature (413)..(519): Pfam Id: PF00652 Pfam Desc: Ricin-type beta-trefoil lectin domain
  misc_feature (1)..(525): NCBI GI: 161598582 Blast Desc: toxin [Bacillus thuringiensis serovar israelensis] gi|228905198|ref|ZP_04069196.1| two-domain toxin [Bacillus thuringiensis IBL 4222] gi|21685448|emb|CAD30104.1| Possible IBL
  misc_feature (15)..(240): NCBI GI: 3023611 Blast Desc: CT1AB_BACTV RecName: Full=Type-1Ab cytolytic delta-endotoxin; AltName: Full=27 kDa cytolytic toxin gi|1765904|emb|CAA67328.1| cytolytic and mosquitocidal toxin
  misc_feature (15)..(240): NCBI GI: 112007103 Blast Desc: cytolytic toxin Cyt1 [Bacillus thuringiensis]
  misc_feature (15)..(240): NCBI GI: 61252393 Blast Desc: CT1AA_BACTM RecName: Full=Type-1Aa cytolytic delta-endotoxin; AltName: Full=27 kDa cytolytic toxin gi|40261|emb|CAA68329.1| protein product [Bacillus thuringiensis]
  misc_feature (15)..(240): NCBI GI: 161598560 Blast Desc: type-1AA cytolytic delta-endotoxin [Bacillus thuringiensis serovar israelensis] gi|228905287|ref|ZP_04069272.1| Type-1Ba cytolytic [Bacillus IBL
  misc_feature (15)..(240): NCBI GI: 157092588 Blast Desc: Cyt1A97 [Bacillus thuringiensis serovar israelensis]
  misc_feature (5)..(226): NCBI GI: 3023618 Blast Desc: CT1BA_BACTW RecName: Full=Type-1Ba cytolytic delta-endotoxin gi|1408457|gb|AAB03693.1| delta endotoxin [Bacillus thuringiensis]
  misc_feature (33)..(187): NCBI GI: 152013901 Blast Desc: dipterans toxic crystal protein-like protein [Bacillus thuringiensis]
  misc_feature (33)..(181): NCBI GI: 152013893 Blast Desc: dipterans toxic crystal protein-like protein [Bacillus thuringiensis] gi|152013899|gb|ABS20056.1| dipterans toxic crystal protein-like protein [Bacillus thuringiensis]
  misc_feature (33)..(181): NCBI GI: 152013895 Blast Desc: dipterans toxic crystal protein-like protein [Bacillus thuringiensis]
  misc_feature: Useful for conferring pesticidal activity to an organism
  misc_feature: Useful for controlling a pest organism
MAQSEFNQNLREQGQSRARVIILRVNNPGYNTNTLDIADIEDIIHLPQAIELANAFQSALVPTTSNFGEDTLRFDVERGLGIATHVYPRAINVNYVTRTLSQTNNQVQSMINKVIEELKSLLGINLANSVLQQLTTVITETFTNLYVQQQSAWLFWGRQTSSQTNYTYNIVFAIQNAQTGSFMKAIPIGFEISAYIARERLLFFNIQDYASYSVKIHAIQVMQPLIHESFQPLRGIFNIITSVNNRSAIQITEYYDENTHDYPVKLWDYNNIINQKWILVFNQTTRAYSIQNLIARYLVLTWDSTPGSNKVFASTNRWNDSQFWILESTADGSIFLTNMKDTQFVLEIENSSTTNGTNVIVNRKNNNAQQKFYLNKVNQEFQDGVYKIKTALNNSSVLQMSEDYFGYTSDYFVKLWTNNNNDINQKWIFEFDSTKSAYQIKSQRDPSLVLAWTWSVPTVKLPIPNNDDHLWFLQNAGSGTYYFVNMTDTRYVLEVASSSTTNGTILTINKRNGNLNQKFLLDMIN

SEQ ID NO: 37 - DNA, 1941 bp, Bacillus sp.
  misc_feature: SGI cDNA ID NO. SG1METG47272
  misc_feature: SGI cDNA ID NO. AGRMET1G166423
  misc_feature: Encodes the peptide sequence at SEQ ID NO 38
  misc_feature: Useful for conferring pesticidal activity to an organism
  misc_feature: Useful for controlling a pest organism
atgaattatatggaagatagttctttagatactttaagtatagttaatgaaacagactttccattatataataattataccgaacctactattgcgccagcattaatagcagtagctcccatcgcacaatatcttgcaacagctatagggaaatgggcggcaaaggcagcattttcaaaagtactatcacttatattcccaggttctcaacctgctactatggaaaaagttcgtacagaagtggaaacacttataaatcaaaaattaagccaagatcgagtcaatatattaaacgcagaatatagggggattattgaggttagtgatgtatttgatgcgtatattaaacaaccaggttttacccctgcaacagccaagggttattttctaaatctaagtggtgctataatacaacgattacctcaatttgaggttcaaacatatgaaggagtatctatagcactttttactcaaatgtgtacacttcatttaactttattaaaagacggaatcctagcagggagtgcatggggatttactcaagctgatgtagattcatttataaaattatttaatcaaaaagtattagattacaggaccagattaatgagaatgtacacagaagagttcggaagattgtgtaaagtcagtcttaaagatggattgacgttccggaatatgtgtaatttatatgtgtttccatttgctgaagcctggtctttaatgagatatgaaggattaaaattacaaagctctctatcattatgggattatgttggtgtctcaattcctgtaaattataatgaatggggaggactagtttataagttattaatgggggaagttaatcaaagattaacaactgttaaatttaattattctttcactaatgaaccagctgatataccagcaagagaaaatattcgtggcgtccatcctatatacgatcctagttctgggcttacaggatggataggaaacggaagaacaaacaattttaattttgctgataacaatggcaatgaaattatggaagttagaacacaaactttttatcaaaatccaaataatgagcctatagcgcctagagatattataaatcaaattttaactgcgccagcaccagcagacctattttttaaaaatgcagatataaatgtaaagttcacacagtggtttcagtctactctatatgggtggaacattaaactcggtacacaaacggttttaagtagtagaaccggaacaataccaccaaattatttagcatatgatggatattatattcgtgctatttcagcttgcccaagaggagtctcacttgcatataatcacgatcttacaacactaacatataatagaatagagtatgattcacctactacagaaaatattattgtagggtttgcaccagataatactaaggacttttattctaaaaaatctcactatttaagtgaaacgaatgatagttatgtaattcctgctctgcaatttgctgaagtttcagatagatcatttttagaagatacgccagatcaagcaacagacggcagtattaaatttgcacgtactttcattagtaatgaagctaagtactctattagactaaacaccgggtttaatacggcaactagatataaattaattatcagggtaagagtaccttatcgcttacctgctggaatacgggtacaatctcagaattcgggaaataatagaatgctaggcagttttactgcaaatgctaatccagaatgggtggattttgtcacagatgcatttacatttaacgatttagggattacaacttcaagtacaaatgctttatttagtatttcttcagatagtttaaattctggagaagagtggtatttatcgcagttgtttttagtaaaagaatcggcctttacgacgcaaattaatccgttactaaagtag

SEQ ID NO: 38 - protein, 646 aa, Bacillus sp.
  misc_feature: SGI Peptide ID NO. SG1METT47272
  misc_feature: SGI Peptide ID NO. AGRMET1T166423
  misc_feature (45)..(214): Pfam Id: PF03945 Pfam Desc: delta endotoxin, N-terminal domain
  misc_feature (1)..(646): NCBI GI: 228905289 Blast Desc: Pesticidal crystal protein cry11Bb [Bacillus thuringiensis IBL 4222] gi|228854361|gb|EEM99034.1| Pesticidal crystal protein cry11Bb [Bacillus thuringiensis IBL 4222]
  misc_feature (4)..(646): NCBI GI: 161598562 Blast Desc: pesticidial crystal protein cry11AA [Bacillus thuringiensis serovar israelensis] gi|117327|sp|P21256.1|C11AA_BACTI RecName: Full=Pesticidal kDa
  misc_feature (4)..(646): NCBI GI: 159141842 Blast Desc: Cry4d [Bacillus thuringiensis]
  misc_feature (4)..(646): NCBI GI: 159141846 Blast Desc: Cry4d [Bacillus thuringiensis]
  misc_feature (4)..(646): NCBI GI: 159141844 Blast Desc: Cry4d [Bacillus thuringiensis]
  misc_feature (4)..(646): NCBI GI: 159141848 Blast Desc: Cry4d [Bacillus thuringiensis]
  misc_feature (4)..(646): NCBI GI: 159141852 Blast Desc: Cry4d [Bacillus thuringiensis]
  misc_feature (4)..(646): NCBI GI: 159141850 Blast Desc: Cry4d [Bacillus thuringiensis]
  misc_feature (4)..(644): NCBI GI: 298162158 Blast Desc: delta-endotoxin [Bacillus thuringiensis]
  misc_feature (4)..(644): NCBI GI: 8928042 Blast Desc: C11BB_BACTV RecName: Full=Pesticidal crystal protein cry11Bb; AltName: Full=84 kDa crystal protein; AltName: Full=Crystaline entomocidal protoxin; AltName: Full=Insecticidal
  misc_feature: Useful for conferring pesticidal activity to an organism
  misc_feature: Useful for controlling a pest organism
MNYMEDSSLDTLSIVNETDFPLYNNYTEPTIAPALIAVAPIAQYLATAIGKWAAKAAFSKVLSLIFPGSQPATMEKVRTEVETLINQKLSQDRVNILNAEYRGIIEVSDVFDAYIKQPGFTPATAKGYFLNLSGAIIQRLPQFEVQTYEGVSIALFTQMCTLHLTLLKDGILAGSAWGFTQADVDSFIKLFNQKVLDYRTRLMRMYTEEFGRLCKVSLKDGLTFRNMCNLYVFPFAEAWSLMRYEGLKLQSSLSLWDYVGVSIPVNYNEWGGLVYKLLMGEVNQRLTTVKFNYSFTNEPADIPARENIRGVHPIYDPSSGLTGWIGNGRTNNFNFADNNGNEIMEVRTQTFYQNPNNEPIAPRDIINQILTAPAPADLFFKNADINVKFTQWFQSTLYGWNIKLGTQTVLSSRTGTIPPNYLAYDGYYIRAISACPRGVSLAYNHDLTTLTYNRIEYDSPTTENIIVGFAPDNTKDFYSKKSHYLSETNDSYVIPALQFAEVSDRSFLEDTPDQATDGSIKFARTFISNEAKYSIRLNTGFNTATRYKLIIRVRVPYRLPAGIRVQSQNSGNNRMLGSFTANANPEWVDFVTDAFTFNDLGITTSSTNALFSISSDSLNSGEEWYLSQLFLVKESAFTTQINPLLK

SEQ ID NO: 39 - DNA, 2319 bp, Bacillus sp.
  misc_feature: SGI cDNA ID NO. SG1METG47321
  misc_feature: SGI cDNA ID NO. AGRMET1G177556
  misc_feature: Encodes the peptide sequence at SEQ ID NO 40
  misc_feature: Useful for conferring pesticidal activity to an organism
  misc_feature: Useful for controlling a pest organism
agtttcacactcccttctattcagacgtatcctataccagatgttcctcaatatgagagtataaatgatgtactaccagaacatactgatatagtcgtaaccaactatgtattagcgccatctattgcggtgaatgatccttggtataatgatcaacaaaaaatacaaacaggtaatgagtattacttatacgtaagagaacaatattggctcaaagtaagtgacaaaacgcttgctccaggtgaaacatatatatatacgcaggtatcaggtataaaggaatcagatttaaacacagtgataaaaacaaccagtcatacgtatggggcagacgcaggtcttagttttagagagggtagtttaagtgctagtatgtcttatgaatattcagaggaactacagatacaggagactaaggtaaacgaagaattgactgcagtacaggaggaaatttcagttacaaatcacgcagatcatacggtagcatggactaagtatatattggttaacaatttttatataaaacgtgccgatggcacaatcgtcaaccaaccatggacaatgacggataaaaatactacccgttcagtttcctatcctgaaggtgctaaccttagtgaggaaccagtggacgttgaaatatcaaatgcaaggaaagacgtgtacaatttatttgctgacaatacaaattccatgttaaaaatagacacaacagattatatgattgaccaggccgctctccaattagaacaagtatcagatgaaatagatgcacttgagaaaatgaagttattcaatttggtacgttgtgcgaaacagttaagtaacaagcgaaaccttcttcattatggcgattttgcatctccaaattggaggaatccagaagatggttggcaagcaagtcctaatgttaccgttttatcggataatccgattttcaaagggaattatgcaaatatgccaggcgcaactgcaactggtggaagcatcactccaacttatttgtatcaaaaagtagatgaatcgaagttaaaaccatatacacgatatttggtacgaggatttgtaggaagtagtaaagagttagaactgtttgtgacacgatacgggaaagaagtgcgtgataaaatgaatatcccaaccagcccaatgaacgtatgcaatgagtatagatctgactctacaatgtcaagtgatccgtgtcagtatgtttatccaacgaatccgaagggattgtgcgaagataaaccacacttcgtcttccacatcgatgtaggagaaatctatccgagaacggatctaggtatcggggttggattcaacatttcttctccatccggtatggcgcagttaagtaatatagaagtgatcgaagccaatccattaacgggtgaagcgttagctcgtgtgaaaaaacgagaaaagaaatggaaaaaagagatggaacagcaatgtgcagtaacagaacaaacggtctcatcggcaacacaagcggtggattacctatttacggatgcacaaaaaaatagattaagagcaacaacaacgatgaaagatattcaaaatgctgaggcaaaggtaaaggccatcccatatgtatataacctatattttgaagaggtacctggcatgaattatgctatttcccaagcactacagtctgatgtttatacagcatctagtttatatagtatccggaatatcattcgaaatggtgattttagtagcagactttcgaactggcatgcgacagcgggtgcggacgtacaagaaagagatggtaaaccgcatgtgttagtcatttcacaatgggatactagtgtgtcacaagaagtatgcgtacaaccagatcacggatatgtcttacgtgtaactgcgagaaaagaaggatcgggcaaaggatatgtgaccctcaccgattgtacggcagaaaatacagaaaccgtgacatttacatcggatgaaaggattgcacatccaaggccgcctgtcagacctgagcacccagttgaaccaggtatctgtgatagaacgcgttatagtgaaagcttcggaattgtaccagagatgaacctgatgagaaatgaacaaccagcaaattatggaacaggaccttgttcctgtgggtgtgggtgtgcgtccacagcgtatcaaacacaggcatatgaaccgcaaccgagtatgaatcgaccttcttctgggtatatcacaaaaacaattgaaatattcccagaaaccaatcgcctgcgaatcgaaattggtgaaacagagggaacattcctcgtagaaagtatagaattagtttgtatggaagactaa

SEQ ID NO: 40 - protein, 772 aa, Bacillus sp.
  misc_feature: SGI Peptide ID NO. SG1METT47321
  misc_feature: SGI Peptide ID NO. AGRMET1T177556
  misc_feature (9)..(201): Pfam Id: PF05431 Pfam Desc: Insecticidal Crystal Toxin, P42
  misc_feature (200)..(687): NCBI GI: 234203282 Blast Desc: pesticidal crystal protein [Bacillus thuringiensis]
  misc_feature (224)..(698): NCBI GI: 215398069 Blast Desc: Cry40-like protein [Bacillus thuringiensis]
  misc_feature (180)..(655): NCBI GI: 40310 Blast Desc: protein product [Bacillus thuringiensis]
  misc_feature (180)..(655): NCBI GI: 161598576 Blast Desc: pesticidial crystal protein cry4BA [Bacillus thuringiensis serovar israelensis] gi|8488969|sp|P05519.2|CR4BA_BACTI RecName: Full=Pesticidal kDa
  misc_feature (224)..(655): NCBI GI: 239638226 Blast Desc: cry4 delta-toxin-like protein ORF2 [Bacillus thuringiensis]
  misc_feature (180)..(655): NCBI GI: 216288 Blast Desc: 130 kDa insecticidal protein (ISRH3) [Bacillus thuringiensis serovar israelensis] gi|225982|prf||1405201A insecticidal protein ISRH3
  misc_feature (224)..(653): NCBI GI: 37999235 Blast Desc: [Bacillus thuringiensis serovar entomocidus]
  misc_feature (180)..(655): NCBI GI: 57639076 Blast Desc: delta-endotoxin [Bacillus thuringiensis serovar israelensis]
  misc_feature (180)..(655): NCBI GI: 149211797 Blast Desc: pesticidal crystal protein [Bacillus thuringiensis]
  misc_feature (224)..(698): NCBI GI: 89000902 Blast Desc: C-terminal half of 130-kDa type delta-endotoxin [Bacillus thuringiensis serovar aizawai]
  misc_feature: Useful for conferring pesticidal activity to an organism
  misc_feature: Useful for controlling a pest organism
SFTLPSIQTYPIPDVPQYESINDVLPEHTDIVVTNYVLAPSIAVNDPWYNDQQKIQTGNEYYLYVREQYWLKVSDKTLAPGETYIYTQVSGIKESDLNTVIKTTSHTYGADAGLSFREGSLSASMSYEYSEELQIQETKVNEELTAVQEEISVTNHADHTVAWTKYILVNNFYIKRADGTIVNQPWTMTDKNTTRSVSYPEGANLSEEPVDVEISNARKDVYNLFADNTNSMLKIDTTDYMIDQAALQLEQVSDEIDALEKMKLFNLVRCAKQLSNKRNLLHYGDFASPNWRNPEDGWQASPNVTVLSDNPIFKGNYANMPGATATGGSITPTYLYQKVDESKLKPYTRYLVRGFVGSSKELELFVTRYGKEVRDKMNIPTSPMNVCNEYRSDSTMSSDPCQYVYPTNPKGLCEDKPHFVFHIDVGEIYPRTDLGIGVGFNISSPSGMAQLSNIEVIEANPLTGEALARVKKREKKWKKEMEQQCAVTEQTVSSATQAVDYLFTDAQKNRLRATTTMKDIQNAEAKVKAIPYVYNLYFEEVPGMNYAISQALQSDVYTASSLYSIRNIIRNGDFSSRLSNWHATAGADVQERDGKPHVLVISQWDTSVSQEVCVQPDHGYVLRVTARKEGSGKGYVTLTDCTAENTETVTFTSDERIAHPRPPVRPEHPVEPGICDRTRYSESFGIVPEMNLMRNEQPANYGTGPCSCGCGCASTAYQTQAYEPQPSMNRPSSGYITKTIEIFPETNRLRIEIGETEGTFLVESIELVCMED

SEQ ID NO: 41 - DNA, 1347 bp, Bacillus sp.
  misc_feature: SGI cDNA ID NO. SG1METG47324
  misc_feature: Encodes the peptide sequence at SEQ ID NO 42
  misc_feature: Useful for conferring pesticidal activity to an organism
  misc_feature: Useful for controlling a pest organism
gtgaatacgttgaaaaagaatatttgtacatgtttgatttgtttatctactttattgtcaatacctatctccggtcaaactacttatgcttacaatagcaaattggtagagaatccaggttcttctattaaaattaccgataatgcagtggactttaaagatgataaagaaaaagcgaaagaatgggggggagaaagagaaaaagaatggaaactaacgaacactgaaaaaggaaaaatgaatgattttttaagtgataaaaacaacataagaacaaactataaagaaattactttttcaatggccggttcatttgaagatgaaatgaaagatttaaaagaaattgacaagatgtttgagaaagcaaatctcacaaattctataaccacttataaaaatgtggaaccagcaatgattggatttaataaacctttaactgaagggaatacaattaattctgaatcttatcaaaagtttaaagaacaattttcaggacaagatattaagtttgatagttatttagatacacatttaaccgcgcagccggtttccagtaaagagagagtcattctgaaggttacagttccaagtggaaaaggttctacgactccaacaaaagcgggtgtagttttaagtaacaatgagtacaaaatgcttattgataatgggtatgtacttcatatagaaaatatatccaaagtagtaaaaaaaggatatgagtgtttacaagttgaaggaacactaagaaagagcctcgactttaaaaatgatatcaatgcagaagcacatagctggggaatgaaaaattatgaggactgggctaaagatttaacgaattctcaaagagaagctttagatggttacgctagacaagattataaagaaattaatgattatttacgaaatcaaggcggtagtggaaatgaagaactggatacacaaatcaaagagatttctgaggccttagaaaagaagccaataccagaaaatattacagtatatagatggtgtggtatgccggaatttggttataaaataagcgatccattaccttcaataaaagattttgaagagaaatttttaaataccataaaagaagataaaggatatatgagtacaagcttatcgagcgaacgtcttgctgcttttggatcaagaaagatcattttacgattacaagttccgaaaggaagtacggccgcgtatttaagtgccattggtggatttgcaagtgaaaaagaaattcttctagataaagatagtaaataccatattaataaaataacagaggtcgttattaaaggcgttaagagatatgtagtggatgctacattaataacaaaataa

SEQ ID NO: 42 - protein, 448 aa, Bacillus sp.
  misc_feature: SGI Peptide ID NO. SG1METT47324
  misc_feature (172)..(247): Pfam Id: PF03496 Pfam Desc: ADP-ribosyltransferase exoenzyme
  misc_feature (287)..(335): Pfam Id: PF03496 Pfam Desc: ADP-ribosyltransferase exoenzyme
  misc_feature (1)..(447): NCBI GI: 197110124 Blast Desc: vegetative insecticidal protein [Bacillus thuringiensis]
  misc_feature (2)..(448): NCBI GI: 57208133 Blast Desc: Isp2a protein [Brevibacillus laterosporus]
  misc_feature (1)..(447): NCBI GI: 197110126 Blast Desc: vegetative insecticidal protein [Bacillus thuringiensis]
  misc_feature (1)..(447): NCBI GI: 150261178 Blast Desc: Vip2A(BR) [Bacillus thuringiensis]
  misc_feature (1)..(447): NCBI GI: 6730533 Blast Desc: Vip2A(BR) [Bacillus thuringiensis]
  misc_feature (51)..(447): NCBI GI: 6730537 Blast Desc: Vip2A(BR) [Bacillus thuringiensis]
  misc_feature (1)..(447): NCBI GI: 228911673 Blast Desc: bthur0013_57960 [Bacillus thuringiensis IBL 200] gi|29650779|gb|AAO86513.1| Vip2Ac [Bacillus thuringiensis] gi|228847997|gb|EEM92874.1| bthur0013_57960 [Bacillus IBL 200]
  misc_feature (1)..(448): NCBI GI: 57283999 Blast Desc: Isp2b protein [Brevibacillus laterosporus]
  misc_feature (1)..(448): NCBI GI: 228943396 Blast Desc: bthur0008_59670 [Bacillus thuringiensis serovar berliner ATCC 10792] gi|228976759|ref|ZP_04137176.1| bthur0003_64130 [Bacillus thuringiensis serovar thuringiensis
  misc_feature (6)..(446): NCBI GI: 148534630 Blast Desc: ADP-ribosyltransferase enzymatic component [Clostridium difficile CD196]
  misc_feature: Useful for conferring pesticidal activity to an organism
  misc_feature: Useful for controlling a pest organism
MNTLKKNICTCLICLSTLLSIPISGQTTYAYNSKLVENPGSSIKITDNAVDFKDDKEKAKEWGGEREKEWKLTNTEKGKMNDFLSDKNNIRTNYKEITFSMAGSFEDEMKDLKEIDKMFEKANLTNSITTYKNVEPAMIGFNKPLTEGNTINSESYQKFKEQFSGQDIKFDSYLDTHLTAQPVSSKERVILKVTVPSGKGSTTPTKAGVVLSNNEYKMLIDNGYVLHIENISKVVKKGYECLQVEGTLRKSLDFKNDINAEAHSWGMKNYEDWAKDLTNSQREALDGYARQDYKEINDYLRNQGGSGNEELDTQIKEISEALEKKPIPENITVYRWCGMPEFGYKISDPLPSIKDFEEKFLNTIKEDKGYMSTSLSSERLAAFGSRKIILRLQVPKGSTAAYLSAIGGFASEKEILLDKDSKYHINKITEVVIKGVKRYVVDATLITK

SEQ ID NO: 43 - DNA, 2640 bp, Bacillus sp.
  misc_feature: SGI cDNA ID NO. SG1METG47325
  misc_feature: SGI cDNA ID NO. AGRMET1g177566
  misc_feature: Encodes the peptide sequence at SEQ ID NO 44
  misc_feature: Useful for conferring pesticidal activity to an organism
  misc_feature: Useful for controlling a pest organism
atgaagaaacaaatagcaagcgttgtcacttgtacgctattagcccctatgctttttaatggagatatgaacgctgcttacgcagctagtcaaacaaaacagacacctgcagctcaggtaaaccaagagaaagaagtagatcgaaaaggattacttggctattactttaaagggaaagattttaatgatcttactgtatttgcaccaacgcgcggaaatactcttgtatatgatcaacaaacagcaaatacattactaactcaaaaacaacaagactttcagtctattcgttgggttggtttaatgcaaagcaaagaaacaggcgattttacatttaacttatcagatgatgaacatgcgatgatagaaatcgatgggaaagttatttctaataaagggaaagaaaaacaagttgtccatttaaaaaaaggacagttcgtttctatcaaaatagaatatcaagctgatgaaccatttaatgcggaaagtcaaacctttaaatatctaaaactctttaaagtagatactaagcaacagtcccatcaaattcaactagacgaattaagaaaccctgaatttaataaaaaggaaacacaagaatttctaacaaaagcaacaaaaacgaatcttattactcaaaaaatgaagagtacaagggacgaagacaccgatacagatggagattctattccggatatttgggaagagaatgggtataccatccaaaataaaattgccgttaaatgggatgattcattagaaaatacagaatatacaaaatttgtttcaaaccctctcgatactcacacggttggagatccttatacagattatgaaaaagcagcaaaagatttagatcgatcaaatgcagaagaaacatttaacccattagttgcggcttttccaagtgtgaatgtgagtatggaaaaggtgatactatctccaaatgagaatttatcaaacagcgttgagtctcaatcatcttcaaattggtcctatacgaatacagaaggagcttctatcgaagctggtgggggaacatcaggcctatcttttggcgtgagtgcaaactatcaacattcagaaacagttgggtatgaatggggaacatctacaggaaatacttcgcaatttaatacagcttcagcagggtatttgaatgcgaatgttcgctacaataacgtgggaacaggtaccatctatgatgtaaagccaacaacgagttttgtattaaataaagataccatcgcaacaataacggcaaaatccaatacgaccgcactaagtatcttaccaggacaaagttatccgaaacaaggtcaaaatggaatcgcgattacatcgatcgatgattttaattcacatccgattacattaaataagcaacaggtagggcatctgttaaataatacacctgtaatgttagaaacaaatcaaacagacggggtctataaagtaaaagatacacatggtaatattgtgacaggtgggacatggaatggtgtgacacaacaaattaaagcaaaaacagcgtctattattgtggatgacggtaaacaggtagcagaaaaacgtgtggccgcaaaggattatacgtacccagaagataaaacaccagaattaacgttaaaagatgcgctgaagctttcattcccagatgaaataaaagaaacagatggattattgtactataacgacaaaccaatttatgaagcgagtgtcatgacttacctggatgagaatacggcaaaagaagtgaagaagcaaatcaatgatacaacgggaaaattcaaggatgtcaataagttatatgatgtgaaactgacaccaaagatgaattttacgatcaaaatggctacattgtatgatggtgcagaaggtggggcaaatgttgggcctttagggaaatggaataatgtgatgattggtggagaagcaaacactggacaaaattcgtactggagtattagtgaaggttacattccatggctagagctatccccagaggcgaaaattaaattgaagaaaaatgctacttactatttaagtatgtatataagagatccgttcttcaataaacaacgtacaatcgtagtaaagggtgatcagtctgaaatagcgagtaaaaaagtaacattaaacaaaaaccatcaaagggttgatattttggtgagaaactctgaaaagaatccaattaatcatatagctattgatccttatacaataaatcatgctgtaaattgggatgatgttacgtttactgaagtttccgcaatgaaacctaaagatctttcagatgatgatattaaagaaaaatataaagagtatagtgtaaatttcgatacaggagtatggaaaatgtatttaaataatgtagtctttaagaatatatctcttcttcaaaattatgtaacaaaatacagagttaaatatgtgggggctactcctgaaaggtctttcgataaaactttaaatagttataaagtagaatcaaatggaagcctaatggtaaacttcttagaatatgatgatggttttggattaaatatggattctccatccaaaaacgttactatttatgctataacagatgatggaagagagatagaagtttaccatagagttggaagtaattcgtaa

SEQ ID NO: 44 - protein, 879 aa, Bacillus sp.
  misc_feature: SGI Peptide ID NO. SG1METT47325
  misc_feature: SGI Peptide ID NO. AGRMET1T177566
  misc_feature (222)..(623): Pfam Id: PF03495 Pfam Desc: Clostridial binary toxin B/anthrax toxin PA
  misc_feature (48)..(157): Pfam Id: PF07691 Pfam Desc: PA14 domain
  misc_feature (770)..(866): Pfam Id: PF09259 Pfam Desc: Fungal immunomodulatory protein Fve
  misc_feature (1)..(874): NCBI GI: 150261179 Blast Desc: Vip1A(BR) [Bacillus thuringiensis]
  misc_feature (1)..(872): NCBI GI: 228976758 Blast Desc: bthur0003_64120 [Bacillus thuringiensis serovar thuringiensis str. T01001] gi|228782971|gb|EEM31133.1| bthur0003_64120 [Bacillus thuringiensis serovar thuringiensis
  misc_feature (1)..(763): NCBI GI: 57283997 Blast Desc: Isp1b protein [Brevibacillus laterosporus]
  misc_feature (66)..(872): NCBI GI: 228942851 Blast Desc: bthur0008_54660 [Bacillus thuringiensis serovar berliner ATCC 10792] gi|228816807|gb|EEM62915.1| bthur0008_54660 [Bacillus thuringiensis serovar berliner ATCC 10792]
  misc_feature (1)..(763): NCBI GI: 228976182 Blast Desc: bthur0003_58890 [Bacillus thuringiensis serovar thuringiensis str. T01001] gi|228783548|gb|EEM31638.1| bthur0003_58890 [Bacillus thuringiensis serovar thuringiensis
  misc_feature (66)..(763): NCBI GI: 228943392 Blast Desc: bthur0008_59650 [Bacillus thuringiensis serovar berliner ATCC 10792] gi|228816294|gb|EEM62471.1| bthur0008_59650 [Bacillus thuringiensis serovar berliner ATCC 10792]
  misc_feature (1)..(758): NCBI GI: 57208131 Blast Desc: Isp1a protein [Brevibacillus laterosporus]
  misc_feature (1)..(690): NCBI GI: 228911674 Blast Desc: bthur0013_57970 [Bacillus thuringiensis IBL 200] gi|29650780|gb|AAO86514.1| Vip1Ac [Bacillus thuringiensis] gi|228847998|gb|EEM92875.1| bthur0013_57970 [Bacillus IBL 200]
  misc_feature (1)..(760): NCBI GI: 228911796 Blast Desc: bthur0013_59140 [Bacillus thuringiensis IBL 200] gi|228847856|gb|EEM92742.1| bthur0013_59140 [Bacillus thuringiensis IBL 200]
  misc_feature (1)..(393): NCBI GI: 167465357 Blast Desc: protective antigen [Paenibacillus larvae subsp. larvae BRL-230010]
  misc_feature: Useful for conferring pesticidal activity to an organism
  misc_feature: Useful for controlling a pest organism
MKKQIASVVTCTLLAPMLFNGDMNAAYAASQTKQTPAAQVNQEKEVDRKGLLGYYFKGKDFNDLTVFAPTRGNTLVYDQQTANTLLTQKQQDFQSIRWVGLMQSKETGDFTFNLSDDEHAMIEIDGKVISNKGKEKQVVHLKKGQFVSIKIEYQADEPFNAESQTFKYLKLFKVDTKQQSHQIQLDELRNPEFNKKETQEFLTKATKTNLITQKMKSTRDEDTDTDGDSIPDIWEENGYTIQNKIAVKWDDSLENTEYTKFVSNPLDTHTVGDPYTDYEKAAKDLDRSNAEETFNPLVAAFPSVNVSMEKVILSPNENLSNSVESQSSSNWSYTNTEGASIEAGGGTSGLSFGVSANYQHSETVGYEWGTSTGNTSQFNTASAGYLNANVRYNNVGTGTIYDVKPTTSFVLNKDTIATITAKSNTTALSILPGQSYPKQGQNGIAITSIDDFNSHPITLNKQQVGHLLNNTPVMLETNQTDGVYKVKDTHGNIVTGGTWNGVTQQIKAKTASIIVDDGKQVAEKRVAAKDYTYPEDKTPELTLKDALKLSFPDEIKETDGLLYYNDKPIYEASVMTYLDENTAKEVKKQINDTTGKFKDVNKLYDVKLTPKMNFTIKMATLYDGAEGGANVGPLGKWNNVMIGGEANTGQNSYWSISEGYIPWLELSPEAKIKLKKNATYYLSMYIRDPFFNKQRTIVVKGDQSEIASKKVTLNKNHQRVDILVRNSEKNPINHIAIDPYTINHAVNWDDVTFTEVSAMKPKDLSDDDIKEKYKEYSVNFDTGVWKMYLNNVVFKNISLLQNYVTKYRVKYVGATPERSFDKTLNSYKVESNGSLMVNFLEYDDGFGLNMDSPSKNVTIYAITDDGREIEVYHRVGSNS

SEQ ID NO: 45 - DNA, 588 bp, Bacillus sp.
  misc_feature: SGI cDNA ID NO. SG1METG47331
  misc_feature: Encodes the peptide sequence at SEQ ID NO 46
  misc_feature: Useful for conferring pesticidal activity to an organism
  misc_feature: Useful for controlling a pest organism
gtgaaatcattggatccagaaaagtatgggagtaaccaagaatggagacaaataggcggtccaaatgacattctgttagaaggcgaagcacaatctgcagcaaccatccaatacacagaatcagtccacgccaacttgtcattttgtgggatggtacatattccgcatgggttcgtgtatataccgaatagcacacgacaacttgcatatagtttgtctggattatttgttaccaatgaaacaagccagagaacaattgtagtagatgactgtggacctgtggatgtaacattgaacgttctgaaagtggtcgggaatattccttatattgcgacagcaatggtacaaggcgataatggggaaacgttcggttcttcgccaaagcaaaagaatcaggttcatctgagttataccgatagtatacaggtggatacagtactaaaattaagtgttgcatccttaccagcatacagcatacaagaggatagtataaaaatatctgattttcaagttacacctgttcaagatcaaggatcaaatctgcttcgttttacagggaccttttcctttcagaatatcccacagtaa

SEQ ID NO: 46 - protein, 195 aa, Bacillus sp.
  misc_feature: SGI Peptide ID NO. SG1METT47331
  misc_feature (43)..(192): Pfam Id: PF07029 Pfam Desc: CryBP1 protein
  misc_feature (45)..(193): NCBI GI: 1429251 Blast Desc: cryBP1 [Paenibacillus popilliae]
  misc_feature (45)..(193): NCBI GI: 46359601 Blast Desc: [Paenibacillus lentimorbus]
  misc_feature (45)..(193): NCBI GI: 46359599 Blast Desc: [Paenibacillus lentimorbus]
  misc_feature (45)..(193): NCBI GI: 62433237 Blast Desc: Orf1-Cryhime1 [Paenibacillus popilliae]
  misc_feature (46)..(193): NCBI GI: 228989191 Blast Desc: bthur0001_58030 [Bacillus thuringiensis serovar tochigiensis BGSC 4Y1] gi|228770540|gb|EEM19089.1| bthur0001_58030 [Bacillus thuringiensis serovar tochigiensis BGSC
  misc_feature (46)..(191): NCBI GI: 161598561 Blast Desc: 19kda accessory protein [Bacillus thuringiensis serovar israelensis] gi|228905288|ref|ZP_04069273.1| 19kDa accessory protein [Bacillus thuringiensis IBL 4222] 19kDa protein
  misc_feature (24)..(193): NCBI GI: 228988982 Blast Desc: bthur0001_56040 [Bacillus thuringiensis serovar tochigiensis BGSC 4Y1] gi|228770744|gb|EEM19278.1| bthur0001_56040 [Bacillus thuringiensis serovar tochigiensis BGSC
  misc_feature (48)..(191): NCBI GI: 228911457 Blast Desc: bthur0013_55920 [Bacillus thuringiensis IBL 200] gi|228848203|gb|EEM93059.1| bthur0013_55920 [Bacillus thuringiensis IBL 200]
  misc_feature (46)..(193): NCBI GI: 169825570 Blast Desc: Bsph_p156 [Lysinibacillus sphaericus C3-41] gi|169828675|ref|YP_001698833.1| Bsph_3194 [Lysinibacillus sphaericus C3-41] gi|168993163|gb|ACA40703.1| Hypothetical C3-41]
  misc_feature (46)..(193): NCBI GI: 194248254 Blast Desc: [Lysinibacillus sphaericus]
  misc_feature: Useful for conferring pesticidal activity to an organism
  misc_feature: Useful for controlling a pest organism
MKSLDPEKYGSNQEWRQIGGPNDILLEGEAQSAATIQYTESVHANLSFCGMVHIPHGFVYIPNSTRQLAYSLSGLFVTNETSQRTIVVDDCGPVDVTLNVLKVVGNIPYIATAMVQGDNGETFGSSPKQKNQVHLSYTDSIQVDTVLKLSVASLPAYSIQEDSIKISDFQVTPVQDQGSNLLRFTGTFSFQNIPQ

SEQ ID NO: 47 - DNA, 3813 bp, Bacillus sp.
  misc_feature: SGI cDNA ID NO. SG1METG47332
  misc_feature: SGI cDNA ID NO. AGRMET1g168542
  misc_feature: Encodes the peptide sequence at SEQ ID NO 48
  misc_feature: Useful for conferring pesticidal activity to an organism
  misc_feature: Useful for controlling a pest organism
atgatagggggacacttcatgaatcaatattatcaaagtaatgaaatggaagttctcgatttaggagtaggtcgttcaaggtatccatacgcacagaagccaacgtctgaattccaagcaacgaattataaagattggatggatatgtgtacaagtaatgaatcaggggaattattcaattctgttagaaatggggttattataggtacagcaatttcatcatacgtactcagcgtatcatttccaatagcttcagcagccgttggaattataagtgtgctacttcctcttatgtggccagaagaggccggagatcctgggactactcaagctcaatttacttgggatcaattaatgagggctgtagaagggattgttaatgagtccatctcaaatctagtaagagatcaagccatcaacacattagccaaattacagtcgagtataaaagactatcaacaagcggtgtgtaatttgaaaaattcttctccaaatgatccgagttatgagcattataaagcggatgtaagaagggaatttaacgacgctgaggatcaagcaaaactcgctattattgacttaagagcaagtggatatgaaatccttttattagctagttatgtagaagccgctaacttacacctacttttattacgagatgtagtccaacatggtgaaagttggggattttcaccacttgaagtccaacaatattactctaatacaagttcaataggaaacccaggtatgttacagctattagccatttatacggaatattgtgtcaaatggtataatagcggtttacagaatcaatggaatacaaataattggaatacatttaatgattttcgtagggatatgaccgtcatggtattagatgtggtatccttctggccaacttatgatccgaagtactatccattaccgacaaaatcacaacttacacggactttatatacaagtcttataaagggtaaagcagtgccgactagcatcaatgatttagaaaattatttagttgctccaccaagcctgtttagatggttgcgtaagatagatttctatttggcaaaaccgaccactcctgaaccgaaatatttaactggcatgaaacaattttatcagtacaccctatctagtaacttagaagattccggcttacagggttcgagtacatccgacgtgtcgtcccttactgttccaaaaccgacatctcaggatgatatttggtcaattattggtacctatgatccattttcgtcagccggtgggtatataggcggttttaaatttaggctgactaaatctgcggatcaagacataataatcgctggagacatcggtactaaaaattatctgggattcccttgtaaacctagtaattcatatgcctgtgatccttgtgatcctaatgattcttgtacggctggaattactgatacggcgaatccttgtaataccgtagatctttacagtcatcgatgttcccatacgggttcttactttgggaattatacgattaagtctctttggtatgcgagctttggctggacgcatgtaagtgcagatgccaataatttgttggatactgagaaaatcactcaaattccagcggtcaaggcatataacattactgctgatggtgtaataaaaggttcaggcagtacaggaggagatttagtaaaactctttaatggatcccaatcaggacaaatgctattaaacgtaacggttccaaaaggctctgaaatcagctatcgtgtcagaatacgttatgcatgtgatgtaacttctaacgtatatgtttctgcaggtgggtctactgcattgtttaatgccaacagtactacaactaatatgtcaactctcacatataacgacttcgggtacttagaaacgattctttttagaaatgtaacacctgattatgatcgtgaaactacagtgcaaatcaacgctcaaggttatattactggatcatttattgttgacaaagtcgaattcattccaacaagggagtctctaacagagtatgaagcaaagcaaaatttagaaaacgcaagaaaggcagtgactgccttgtttaccaatgatatgaaaaattcattacgagtggacatcacagattatgatgtagatcaagctgcaaacaaagtagactgtttgttggatgatatttttccaaaagaaaaaatgatgttgcgagatcaggtgaaacatgcgaaacgcttaagccaggcaagaaatttattaaactatggtgattttaaatcccaaaattggtcggatgaaaatgggtggagagtaagtaataatgtcacagttcaatctaattatccgatatctaaagggcgttatctcaatatgcccggagcaagaagtatcgactttagtaataatatatatccaacatacgcctatcaaaaagttgatgaattcaagttaaaaccgtatacacgatatttggtacgagggtttgtgggaaatagcacggatttagagctgtttgtgacacgatacggccaagaagtgcatgataaaatgaatatctcattcagtccaatgaacatatacagtcaaacagctacgatttcagatggctgtggtatggggcaattatctaattatccgatgtcaagtgatccatgtcagacaattgcatatccaagcaatccattcggtatgccaatgtcgtctacgaaaggattgtgtgaagacaaacaacatttcgtattccatatagatgtaggtgaaatcgaccaaagagtgaatctgggtataggagttggatttaaaattgcttctccatccggtagggcccaattagacaatctagaagtgatagaggcaaatccattaacaggtgaagcattagctcgtgtcaaaaaacaagaacagaaatggaagagagagatggaacagagatgtgcactgacagaaaaaacagtgtcaacggcaacccaagcggtaaattccctattcacaaatgcacaaaaaaatagattgaaagcaaagacaacgatgctggatattcaaaatgctgagacaaaagtaaagaccattccatatgtatacaattcagagtttgaagaggtaccaggtatgaatgatgctattttccaagtattacagtctgatgtttatacagcatcaagtttatatgctcaacgaaatgtgatccgaaacggtgattttagtaatggactttcgaattggcatgcgacagccggtgcgggtgttgaaaaaagagacaggaacccacatgtactagtcatctcacaatgggatgtgaatgtatcacaagaggtatgcgtacaaccagagcgcggatatgttttacgtgtaaccgcaagaaaagaaggatctggcaaaggatatgtaaccttcagtgattgtacatcagagaatacagaaaccgttacatttacgtcagatgaaacggttccaaatccgcggattatagtatcatctagacgtacgattgaaccagctgcatgtgatagcatccgttacaacgaaagtttcggaagtgtatcagatacaaacatgatgagttatacaacagagaatgctagtagggaggtatgttcttgtgggtgtaataacacgatacacacaccatccacaagttatcaagcaaaggcatacacatcgaactcaagtgtaccaaacatgatgggcccttctcctggctatatcacaaaaacgattgaactgttccctgaaacaaatcgtctgcgaatcgaaatgggagaaacagatggaacattcctcgtagaaagtatagaattaatttgtatggaagaataa

SEQ ID NO: 48 - protein, 1270 aa, Bacillus sp.
  misc_feature: SGI Peptide ID NO. SG1METT47332
  misc_feature: SGI Peptide ID NO. AGRMET1T168542
  misc_feature (68)..(305): Pfam Id: PF03945 Pfam Desc: delta endotoxin, N-terminal domain
  misc_feature (534)..(672): Pfam Id: PF03944 Pfam Desc: delta endotoxin
  misc_feature (311)..(524): Pfam Id: PF00555 Pfam Desc: delta endotoxin
  misc_feature (7)..(1270): NCBI GI: 17385650 Blast Desc: crystal protein CryE6S [Bacillus thuringiensis]
  misc_feature (7)..(1145): NCBI GI: 17385646 Blast Desc: crystal protein CryE6L [Bacillus thuringiensis]
  misc_feature (7)..(1147): NCBI GI: 234203282 Blast Desc: pesticidal crystal protein [Bacillus thuringiensis]
  misc_feature (26)..(1147): NCBI GI: 57639076 Blast Desc: delta-endotoxin [Bacillus thuringiensis serovar israelensis]
  misc_feature (14)..(851): NCBI GI: 15721993 Blast Desc: crystal protein [Bacillus thuringiensis serovar yunnanensis]
  misc_feature (26)..(1147): NCBI GI: 40310 Blast Desc: protein product [Bacillus thuringiensis]
  misc_feature (26)..(1147): NCBI GI: 161598576 Blast Desc: pesticidial crystal protein cry4BA [Bacillus thuringiensis serovar israelensis] gi|8488969|sp|P05519.2|CR4BA_BACTI RecName: Full=Pesticidal kDa
  misc_feature (26)..(1147): NCBI GI: 149211797 Blast Desc: pesticidal crystal protein [Bacillus thuringiensis]
  misc_feature (14)..(1267): NCBI GI: 225348557 Blast Desc: Cry8Ka2 delta-endotoxin [Bacillus thuringiensis serovar kenyae]
  misc_feature (26)..(1147): NCBI GI: 149211793 Blast Desc: pesticidal crystal protein [Bacillus thuringiensis]
  misc_feature: Useful for conferring pesticidal activity to an organism
  misc_feature: Useful for controlling a pest organism
MIGGHFMNQYYQSNEMEVLDLGVGRSRYPYAQKPTSEFQATNYKDWMDMCTSNESGELFNSVRNGVIIGTAISSYVLSVSFPIASAAVGIISVLLPLMWPEEAGDPGTTQAQFTWDQLMRAVEGIVNESISNLVRDQAINTLAKLQSSIKDYQQAVCNLKNSSPNDPSYEHYKADVRREFNDAEDQAKLAIIDLRASGYEILLLASYVEAANLHLLLLRDVVQHGESWGFSPLEVQQYYSNTSSIGNPGMLQLLAIYTEYCVKWYNSGLQNQWNTNNWNTFNDFRRDMTVMVLDVVSFWPTYDPKYYPLPTKSQLTRTLYTSLIKGKAVPTSINDLENYLVAPPSLFRWLRKIDFYLAKPTTPEPKYLTGMKQFYQYTLSSNLEDSGLQGSSTSDVSSLTVPKPTSQDDIWSIIGTYDPFSSAGGYIGGFKFRLTKSADQDIIIAGDIGTKNYLGFPCKPSNSYACDPCDPNDSCTAGITDTANPCNTVDLYSHRCSHTGSYFGNYTIKSLWYASFGWTHVSADANNLLDTEKITQIPAVKAYNITADGVIKGSGSTGGDLVKLFNGSQSGQMLLNVTVPKGSEISYRVRIRYACDVTSNVYVSAGGSTALFNANSTTTNMSTLTYNDFGYLETILFRNVTPDYDRETTVQINAQGYITGSFIVDKVEFIPTRESLTEYEAKQNLENARKAVTALFTNDMKNSLRVDITDYDVDQAANKVDCLLDDIFPKEKMMLRDQVKHAKRLSQARNLLNYGDFKSQNWSDENGWRVSNNVTVQSNYPISKGRYLNMPGARSIDFSNNIYPTYAYQKVDEFKLKPYTRYLVRGFVGNSTDLELFVTRYGQEVHDKMNISFSPMNIYSQTATISDGCGMGQLSNYPMSSDPCQTIAYPSNPFGMPMSSTKGLCEDKQHFVFHIDVGEIDQRVNLGIGVGFKIASPSGRAQLDNLEVIEANPLTGEALARVKKQEQKWKREMEQRCALTEKTVSTATQAVNSLFTNAQKNRLKAKTTMLDIQNAETKVKTIPYVYNSEFEEVPGMNDAIFQVLQSDVYTASSLYAQRNVIRNGDFSNGLSNWHATAGAGVEKRDRNPHVLVISQWDVNVSQEVCVQPERGYVLRVTARKEGSGKGYVTFSDCTSENTETVTFTSDETVPNPRIIVSSRRTIEPAACDSIRYNESFGSVSDTNMMSYTTENASREVCSCGCNNTIHTPSTSYQAKAYTSNSSVPNMMGPSPGYITKTIELFPETNRLRIEMGETDGTFLVESIELICMEE

SEQ ID NO: 49 - DNA, 1125 bp, Bacillus sp.
  misc_feature: SGI cDNA ID NO. SG1METG47362
  misc_feature: SGI cDNA ID NO. AGRMET1G173579
  misc_feature: Encodes the peptide sequence at SEQ ID NO 50
  misc_feature: Useful for conferring pesticidal activity to an organism
  misc_feature: Useful for controlling a pest organism
atgtatacagattttcaaattaaattaaaacgtgcttatcaaaggagtggattttgtatggcttatgaagtaaatgaggataaacagtatttagaggagttagaaaaagaagtaaaagttttagaaccatatactttttatcgtatacgtactttctgtggaaaaatgtttgacgtatcaggacagtcacatgctaacagtgcaactgttactcaatattctattaacaatcaaaaaaaccagaatttccttgtgtttaatcttgatgatggatattccatcattgccgcagagcatagtggtaaagtactcgatttatcacaaagtatctattggattatacaatacgattttcgtaatgcagataatcagaagtttcttatcgggaataatggaacaattgcagtaaaaaaaagtggaaaggtgcttgatgtacgtggctcatcaacgtctaatggtacgcctattatagactatagttttcagaataaacccaatcaaaaattcagttttgaacctgttagatttttccgagtgccagctcctccaattaaatcattaccacctgcaccagattttaagaatgatattaatgaaaagttaccagatacaacaagccctattatcacacactatacaactattccatattttatggtcaatgacccaacatttaatttacaacaaaaaatccaaaactctccttattataaattagtcaaaattcaatattgggaaaaggttactcaacgaatattaggaccaagcgactcgtatgaatatgaaaggagaaaaggagtatctcgaacagaccaaacaagtatgacagagactgtttccatgtcaattggagcagattttggttttatgtttaaaggtttttcagcaaatctttcaacacaaatttcaaaagaattatctgttacgaaaagtacttcgaatacagaaatgacggaagaaacctataaggaaaactataccaatccatttagtcatgagttagcacgtgctcaatatatgctagtaaacgaattttatgtaacaagaatggatgatactcgcataacagcgaattggactgtaagaaacgacaaagaaactgttacaagaattttccctaaataa

SEQ ID NO: 50 - protein, 374 aa, Bacillus sp.
  misc_feature: SGI Peptide ID NO. SG1METT47362
  misc_feature: SGI Peptide ID NO. AGRMET1T173579
  misc_feature (182)..(373): Pfam Id: PF05431 Pfam Desc: Insecticidal Crystal Toxin, P42
  misc_feature (53)..(169): Pfam Id: PF00652 Pfam Desc: Ricin-type beta-trefoil lectin domain
  misc_feature (1)..(374): NCBI GI: 228911944 Blast Desc: 41.9 kDa insecticidal toxin [Bacillus thuringiensis IBL 200] gi|228847693|gb|EEM92619.1| 41.9 kDa insecticidal toxin [Bacillus thuringiensis IBL 200]
  misc_feature (44)..(373): NCBI GI: 229170564 Blast Desc: 41.9 kDa insecticidal toxin [Bacillus cereus AH621] gi|228612913|gb|EEK70090.1| 41.9 kDa insecticidal toxin [Bacillus cereus AH621]
  misc_feature (57)..(374): NCBI GI: 229100569 Blast Desc: 41.9 kDa insecticidal toxin [Bacillus cereus Rock3-29] gi|229106953|ref|ZP_04237053.1| 41.9 kDa insecticidal toxin [Bacillus cereus Rock3-28] gi|229119132|ref|ZP_04248459.1| 41.9
  misc_feature (57)..(373): NCBI GI: 112297518 Blast Desc: binary toxin A [Lysinibacillus sphaericus]
  misc_feature (57)..(373): NCBI GI: 2293380 Blast Desc: P42 component of the binary toxin [Bacillus sphaericus]
  misc_feature (57)..(373): NCBI GI: 3641861 Blast Desc: BinA4 protein [Bacillus sphaericus]
  misc_feature (57)..(373): NCBI GI: 117318 Blast Desc: BINA2_BACSH RecName: Full=41.9 kDa insecticidal toxin; AltName: Full=Strain 2297 gi|40223|emb|CAA30074.1| protein product [Bacillus sphaericus] gi|4467365|emb|CAB37658.1| BinA
  misc_feature (57)..(373): NCBI GI: 2293372 Blast Desc: P42 component of the binary toxin [Bacillus sphaericus] gi|2293374|emb|CAA73758.1| P42 component of the binary toxin [Bacillus sphaericus] gi|2293376|emb|CAA73759.1| P42
  misc_feature (57)..(373): NCBI GI: 169825568 Blast Desc: insecticidal toxin [Lysinibacillus sphaericus C3-41] gi|169828673|ref|YP_001698831.1| insecticidal toxin [Lysinibacillus sphaericus C3-41] RecName: Full=41.9 kDa toxin;
  misc_feature (57)..(373): NCBI GI: 117319 Blast Desc: BINA3_BACSH RecName: Full=41.9 kDa insecticidal toxin; AltName: Full=Strain IAB59 gi|40226|emb|CAA33087.1| protein product [Bacillus sphaericus]
  misc_feature: Useful for conferring pesticidal activity to an organism
  misc_feature: Useful for controlling a pest organism
MYTDFQIKLKRAYQRSGFCMAYEVNEDKQYLEELEKEVKVLEPYTFYRIRTFCGKMFDVSGQSHANSATVTQYSINNQKNQNFLVFNLDDGYSIIAAEHSGKVLDLSQSIYWIIQYDFRNADNQKFLIGNNGTIAVKKSGKVLDVRGSSTSNGTPIIDYSFQNKPNQKFSFEPVRFFRVPAPPIKSLPPAPDFKNDINEKLPDTTSPIITHYTTIPYFMVNDPTFNLQQKIQNSPYYKLVKIQYWEKVTQRILGPSDSYEYERRKGVSRTDQTSMTETVSMSIGADFGFMFKGFSANLSTQISKELSVTKSTSNTEMTEETYKENYTNPFSHELARAQYMLVNEFYVTRMDDTRITANWTVRNDKETVTRIFPK

SEQ ID NO: 51 - DNA, 785 bp, Bacillus sp.
  misc_feature: SGI cDNA ID NO. SG1METG47247
  misc_feature: SGI cDNA ID NO. AGRMET1G21859
  misc_feature: Encodes the peptide sequence at SEQ ID NO 52
  misc_feature: Useful for conferring pesticidal activity to an organism
  misc_feature: Useful for controlling a pest organism
atgataattaattttgatgacgatgtaagatctgtttggcatcaaacatttagtcattcaccttcatttttgagagtattcaattatgatatatctaaccaagtaataattccaaaatctgttgaaatagatcttccagatttaactttattacgttcatctgtgcaaattttggaaaataattctagtatacctcagactaaatctttaaatcttactgatacaacaactgatacatcttctacagctgttaccaagggggtaaaaactacaactggtataaaaggaggattgaaattttctgttaaattaggagttttatcagcagaaactagtgttgaagtatctcttagtgtagaagcaaattttagtacaacaaccacaaaaacaaccacaaaaacaacgacatggactgcaaatgatccaataacagcccctcctcgaactagaataaaagcaacacatttaatttatggagggaaattttcagttcctcttacattaaatgctgatattactggagatccaaatgcttatgatgaataccttacagttagtggaccttatctaatagctgctggaaaatataataatgaaataggtgctatacctattagtaatatgtctggtaaaatagataatcgttatagagcaacagatcaacatggtaaaattgtatgggttggagatgcaattactgaagtagattatggtttatattctacagttagaattgatgaaacacctatatatgctaatgaaggagaatctagaacttattattt

SEQ ID NO: 52 - protein, 261 aa, Bacillus sp.
  misc_feature: SGI Peptide ID NO. SG1METT47247
  misc_feature: SGI Peptide ID NO. AGRMET1T21859
  misc_feature (42)..(258): Pfam Id: PF03318 Pfam Desc: Clostridium epsilon toxin ETX/Bacillus mosquitocidal toxin MTX2
  misc_feature (27)..(175): Pfam Id: PF01117 Pfam Desc: Aerolysin toxin
  misc_feature (20)..(261): NCBI GI: 8928022 Blast Desc: C15AA_BACUT RecName: Full=Pesticidal crystal protein cry15Aa; AltName: Full=38 kDa crystal protein; AltName: Full=Crystaline entomocidal protoxin; AltName: Full=Insecticidal
  misc_feature (2)..(261): NCBI GI: 16588691 Blast Desc: AF316145_2 crystal protein NT40KD [Bacillus thuringiensis serovar dakota]
  misc_feature (7)..(261): NCBI GI: 294661779 Blast Desc: crystal protein [Bacillus thuringiensis]
  misc_feature (26)..(261): NCBI GI: 75758299 Blast Desc: Pesticidial crystal protein cry15Aa [Bacillus thuringiensis serovar israelensis ATCC 35646] gi|228904971|ref|ZP_04069020.1| Pesticidial crystal protein IBL
  misc_feature (26)..(261): NCBI GI: 292398077 Blast Desc: crystal protein [Bacillus thuringiensis serovar malayensis]
  misc_feature (2)..(257): NCBI GI: 8567977 Blast Desc: AF038048_1 crystal protein [Bacillus thuringiensis]
  misc_feature (26)..(257): NCBI GI: 75758300 Blast Desc: Pesticidial crystal protein cry15Aa [Bacillus thuringiensis serovar israelensis ATCC 35646] gi|228904970|ref|ZP_04069019.1| Pesticidial crystal protein IBL
  misc_feature (26)..(257): NCBI GI: 255653180 Blast Desc: Cry [Bacillus thuringiensis serovar jegathesan]
  misc_feature (27)..(261): NCBI GI: 112253719 Blast Desc: Cry51Aa1 [Bacillus thuringiensis F14-1]
  misc_feature (18)..(260): NCBI GI: 48290384 Blast Desc: parasporin 1470D [Bacillus thuringiensis serovar shandongiensis]
  misc_feature: Useful for conferring pesticidal activity to an organism
  misc_feature: Useful for controlling a pest organism
MIINFDDDVRSVWHQTFSHSPSFLRVFNYDISNQVIIPKSVEIDLPDLTLLRSSVQILENNSSIPQTKSLNLTDTTTDTSSTAVTKGVKTTTGIKGGLKFSVKLGVLSAETSVEVSLSVEANFSTTTTKTTTKTTTWTANDPITAPPRTRIKATHLIYGGKFSVPLTLNADITGDPNAYDEYLTVSGPYLIAAGKYNNEIGAIPISNMSGKIDNRYRATDQHGKIVWVGDAITEVDYGLYSTVRIDETPIYANEGESRTYY

SEQ ID NO: 53 - DNA, 990 bp, Bacillus sp.
  misc_feature: SGI cDNA ID NO. SG1METG47215
  misc_feature: SGI cDNA ID NO. AGRMET1g138898
  misc_feature: Encodes the peptide sequence at SEQ ID NO 54
  misc_feature: Useful for conferring pesticidal activity to an organism
  misc_feature: Useful for controlling a pest organism
atgaaaaaagttttaaacatgaataacaattcaaaaatagcattggcaattgcaactactactggaatcgtattaacatcattaacaccaacttatgctgcaacaaatggtacaaatgaaactagtcaaataacaaaattaaaagctcaagaataccaaattgattcatcaaatcaatcaaacagaagtcaatttaatacatttaattttcaagctgttgatttatatcgttactttaatcttccgggaactgttgcttttaggccccatgccaatactacattcgagttcaaggatgctcagataaaagaagtgggatcaccaaaaattgaaggtgaacgttctttatttgtgggtaaaaatatattgagaaatgactcaaatcgcgagcaagaattaactactagtgaattctccaaaacatatgctaatacagtttctacttcagtaacacacggagctgaagtaggtgcagatgtaacatcaacatttggtatccctttaattggccctaccgaaattacattatctgctagttataacttttctaatactagtactgaagaacagtcagaagagcacacttatgtggcctctccacaaaccgtttctgtacctgcacattcagctgtagaagtagaagttaaattgaagacaatggatatttcaggagatgttgaattaaatgctgtaggatatggtgcaattcgtaatgttcaatttgttacattgagtggttcagatatctataaagatgtaacagctagggagtttttagatactcgtagagagaatgaactattcgggaaacatttattccctggagtatatgatgcacctataaaagataatggaaatggtacttttactttgaatggaaagggaaaatatagagcagaatatggatctacatttgaagttaatgtaatggatataaaaacaggaaaaactctagaaacaaaaaatattcctgccgatattatagaataa

SEQ ID NO: 54 - protein, 329 aa, Bacillus sp.
  misc_feature: SGI Peptide ID NO. SG1METT47215
  misc_feature: SGI Peptide ID NO. AGRMET1T138898
  misc_feature (104)..(316): Pfam Id: PF03318 Pfam Desc: Clostridium epsilon toxin ETX/Bacillus mosquitocidal toxin MTX2
  misc_feature (7)..(323): NCBI GI: 1302634 Blast Desc: 35.8-kilodalton mosquitocidal toxin [Lysinibacillus sphaericus] gi|1302636|gb|AAB36656.1| 35.8-kilodalton mosquitocidal toxin [Lysinibacillus sphaericus] 35.8-kilodalton
  misc_feature (7)..(323): NCBI GI: 1302638 Blast Desc: 35.8-kilodalton mosquitocidal toxin [Lysinibacillus sphaericus] gi|1302640|gb|AAB36658.1| 35.8-kilodalton mosquitocidal toxin [Lysinibacillus sphaericus] 35.8-kilodalton
  misc_feature (7)..(323): NCBI GI: 169828327 Blast Desc: mosquitocidal toxin gene [Lysinibacillus sphaericus C3-41] gi|168992815|gb|ACA40355.1| 35.8-kilodalton mosquitocidal toxin gene, complete cds [Lysinibacillus sphaericus C3-41]
  misc_feature (7)..(323): NCBI GI: 1302632 Blast Desc: 35.8-kilodalton mosquitocidal toxin [Lysinibacillus sphaericus]
  misc_feature (123)..(312): NCBI GI: 167461657 Blast Desc: Plarl_03715 [Paenibacillus larvae subsp. larvae BRL-230010]
  misc_feature (2)..(323): NCBI GI: 228918652 Blast Desc: 35.8-kilodalton mosquitocidal toxin [Bacillus thuringiensis serovar pulsiensis BGSC 4CC1] gi|228840997|gb|EEM86212.1| 35.8-kilodalton mosquitocidal toxin
  misc_feature (7)..(323): NCBI GI: 228924919 Blast Desc: 35.8-kilodalton mosquitocidal toxin [Bacillus thuringiensis serovar huazhongensis BGSC 4BD1] gi|228834731|gb|EEM80219.1| 35.8-kilodalton mosquitocidal toxin
  misc_feature (7)..(316): NCBI GI: 228918255 Blast Desc: bthur0012_54310 [Bacillus thuringiensis serovar pulsiensis BGSC 4CC1] gi|228841406|gb|EEM86552.1| bthur0012_54310 [Bacillus thuringiensis serovar pulsiensis BGSC 4CC1]
  misc_feature (86)..(323): NCBI GI: 228949369 Blast Desc: bthur0007_54850 [Bacillus thuringiensis serovar monterrey BGSC 4AJ1] gi|228810352|gb|EEM56710.1| bthur0007_54850 [Bacillus thuringiensis serovar monterrey BGSC 4AJ1]
  misc_feature (78)..(326): NCBI GI: 27525861 Blast Desc: epsilon toxin [Clostridium perfringens D]
  misc_feature: Useful for conferring pesticidal activity to an organism
  misc_feature: Useful for controlling a pest organism
MKKVLNMNNNSKIALAIATTTGIVLTSLTPTYAATNGTNETSQITKLKAQEYQIDSSNQSNRSQFNTFNFQAVDLYRYFNLPGTVAFRPHANTTFEFKDAQIKEVGSPKIEGERSLFVGKNILRNDSNREQELTTSEFSKTYANTVSTSVTHGAEVGADVTSTFGIPLIGPTEITLSASYNFSNTSTEEQSEEHTYVASPQTVSVPAHSAVEVEVKLKTMDISGDVELNAVGYGAIRNVQFVTLSGSDIYKDVTAREFLDTRRENELFGKHLFPGVYDAPIKDNGNGTFTLNGKGKYRAEYGSTFEVNVMDIKTGKTLETKNIPADIIE

SEQ ID NO: 55 - DNA, 672 bp, Bacillus sp.
  misc_feature: SGI cDNA ID NO. SG1METG192243
  misc_feature: SGI cDNA ID NO. AGRMET1G154345
  misc_feature: Encodes the peptide sequence at SEQ ID NO 56
  misc_feature: Useful for conferring pesticidal activity to an organism
  misc_feature: Useful for controlling a pest organism
ttgaaatatgatagtaaagtagttgagtacataggagaaaatgaatttaaaaatacctctgatgtaactcagaagttttcaacagctaaatatactaaaactgtaacagagtcagtagcaactgcgacaacaaaaggttttaaagtaggaggttcaggtgacggtagtaacatatttaccattccactactcttaaataacggtataaaaataaatgcagaattcaatgcttcaactaccgagacaaaaacaaaatccgaagcaatagcactagaagcacctgcacaatctatagaagttccagcacataaaacatttaaagcagatgtcgtattggaacaaagaaatttctggggggatatcaactttactggtgtagggagtaatccggtgactacaattaagggaactgcatcatattgggctccaaatggtatgggtgcatgggagcaatatacttttaatgataatacaaaaaaatattttgataagttaccccttagtgaacaaatgctaataaattgggaattgtggacatttgttaataatgatgtacatgttaagggggtagctaacattaaaggtatatttggtagtatgctaacagttaatgtttatgatattacagataaatcgaatcctactttagtagaaacaagaagtttcaagtaa

SEQ ID NO: 56 - protein, 223 aa, Bacillus sp.
  misc_feature: SGI Peptide ID NO. SG1METT192243
  misc_feature: SGI Peptide ID NO. AGRMET1T154345
  misc_feature (5)..(213): Pfam Id: PF03318 Pfam Desc: Clostridium epsilon toxin ETX/Bacillus mosquitocidal toxin MTX2
  misc_feature (1)..(222): NCBI GI: 169825571 Blast Desc: Mtx2/3 toxin-like protein [Lysinibacillus sphaericus C3-41] gi|169828676|ref|YP_001698834.1| Mtx2/3 toxin-like protein [Lysinibacillus sphaericus C3-41] gi|168993164|gb|ACA40704.1|
  misc_feature (1)..(223): NCBI GI: 228949431 Blast Desc: bthur0007_55440 [Bacillus thuringiensis serovar monterrey BGSC 4AJ1] gi|228810244|gb|EEM56606.1| bthur0007_55440 [Bacillus thuringiensis serovar monterrey BGSC 4AJ1]
  misc_feature (9)..(221): NCBI GI: 228911665 Blast Desc: bthur0013_57880 [Bacillus thuringiensis IBL 200] gi|228847989|gb|EEM92866.1| bthur0013_57880 [Bacillus thuringiensis IBL 200]
  misc_feature (10)..(121): NCBI GI: 228949369 Blast Desc: bthur0007_54850 [Bacillus thuringiensis serovar monterrey BGSC 4AJ1] gi|228810352|gb|EEM56710.1| bthur0007_54850 [Bacillus thuringiensis serovar monterrey BGSC 4AJ1]
  misc_feature (18)..(123): NCBI GI: 167461657 Blast Desc: Plarl_03715 [Paenibacillus larvae subsp. larvae BRL-230010]
  misc_feature (10)..(220): NCBI GI: 126653153 Blast Desc: BB14905_15440 [Bacillus sp. B14905] gi|126590069|gb|EAZ84195.1| BB14905_15440 [Bacillus sp. B14905]
  misc_feature (10)..(123): NCBI GI: 228937010 Blast Desc: bthur0009_54170 [Bacillus thuringiensis serovar andalousiensis BGSC 4AW1] gi|228822658|gb|EEM68551.1| bthur0009_54170 [Bacillus thuringiensis serovar andalousiensis
  misc_feature (5)..(139): NCBI GI: 1378050 Blast Desc: Mtx2 [Lysinibacillus sphaericus]
  misc_feature (5)..(139): NCBI GI: 1378030 Blast Desc: Mtx2 [Lysinibacillus sphaericus]
  misc_feature (5)..(139): NCBI GI: 1378046 Blast Desc: Mtx2 [Lysinibacillus sphaericus]
  misc_feature: Useful for conferring pesticidal activity to an organism
  misc_feature: Useful for controlling a pest organism
MKYDSKVVEYIGENEFKNTSDVTQKFSTAKYTKTVTESVATATTKGFKVGGSGDGSNIFTIPLLLNNGIKINAEFNASTTETKTKSEAIALEAPAQSIEVPAHKTFKADVVLEQRNFWGDINFTGVGSNPVTTIKGTASYWAPNGMGAWEQYTFNDNTKKYFDKLPLSEQMLINWELWTFVNNDVHVKGVANIKGIFGSMLTVNVYDITDKSNPTLVETRSFK

SEQ ID NO: 57 - DNA, 1089 bp, Bacillus sp.
  misc_feature: SGI cDNA ID NO. SG1METG186283
  misc_feature: SGI cDNA ID NO. AGRMET1G147772
  misc_feature: Encodes the peptide sequence at SEQ ID NO 58
  misc_feature: Useful for conferring pesticidal activity to an organism
  misc_feature: Useful for controlling a pest organism
atgaaaaataaatcaactaaagtaattgtatgtgctttatcagctttaatggtttcaccatgtatttcagttgctgaagaatcaagtttatctaattcgaatttgaatcaaaaagtattaactccatttaccgagtcatatattgatacagtacaaaatagaatgaaacaaagagatttagagtcaaaaataactggaaaaccgattaacatgcaagaacaaataatagatggatggtttttggctagattttggatatttaaagatcaaaataataatcatcaaactaatagatttatatcatggtttaaagaaaaccttactatcccaaatgggtatgacagaattgcagaacaaatggggttaaaaatagaagcattaaataatatggatgtaacaaatgtagattacaaatctaaaacaggggatactatatataatggtatctcagaattgaaaaattcgacaggaactatccaaaaaatgaaaacagatagttttcaaagagattatacaaaatcaacgtcaacatcaataacaaatggattacaagttggatttaaagttactgccaagggaatagttgctttagcgggtgccgattttgaaacaagtgttacttataatttatcatctactgatactgaaacaagtacaatatcagacaagtttactgttccatctcaagaagttacattaccaccagggcataaagcggtagtgaaacatgatttgaggaaaatggtatactctgggagccatgacttaaaaggtgatttaaatattacttttaatgacaaagaaatagtacaaaagtttatctatccaaattatagatcaattaatttatctgatatccgtaaaacgatgatcgaaattgatgagtggaataatgtaaaaccggttgacttttatcaactagttggagttaagaatcatataaaaaatggtgatactttatatatagatactccagcaaagtttaattttaatggtgctaatccatattatagagccacatttacggaatatgatggaaacggaaatcctgtaaaaacaaagttgttgagtgaaaattataaaatttaa

SEQ ID NO: 58 - protein, 362 aa, Bacillus sp.
  misc_feature: SGI Peptide ID NO. SG1METT186283
  misc_feature: SGI Peptide ID NO. AGRMET1T147772
  misc_feature (95)..(327): Pfam Id: PF03318 Pfam Desc: Clostridium epsilon toxin ETX/Bacillus mosquitocidal toxin MTX2
  misc_feature (1)..(362): NCBI GI: 85542860 Blast Desc: Sip1A [Bacillus thuringiensis]
  misc_feature (141)..(260): NCBI GI: 225166784 Blast Desc: pC2C203U28_p051 [Clostridium botulinum] gi|253771427|ref|YP_003034260.1| epsilon-toxin type B [Clostridium botulinum D str. 1873] gi|225007353|dbj|BAH29452.1|
  misc_feature (142)..(240): NCBI GI: 228918255 Blast Desc: bthur0012_54310 [Bacillus thuringiensis serovar pulsiensis BGSC 4CC1] gi|228841406|gb|EEM86552.1| bthur0012_54310 [Bacillus thuringiensis serovar pulsiensis BGSC 4CC1]
  misc_feature (122)..(264): NCBI GI: 159039898 Blast Desc: Sare_4379 [Salinispora arenicola CNS-205] gi|157918733|gb|ABW00161.1| Sare_4379 [Salinispora arenicola CNS-205]
  misc_feature (134)..(256): NCBI GI: 315150965 Blast Desc: conserved [Enterococcus faecalis TX0012]
  misc_feature (152)..(248): NCBI GI: 58616725 Blast Desc: Cry14-4 [Bacillus thuringiensis serovar darmstadiensis] gi|56089905|gb|AAV70918.1| Cry14-4 [Bacillus thuringiensis serovar darmstadiensis]
  misc_feature (142)..(270): NCBI GI: 159037235 Blast Desc: Sare_1604 [Salinispora arenicola CNS-205] gi|157916070|gb|ABV97497.1| Sare_1604 [Salinispora arenicola CNS-205]
  misc_feature (146)..(304): NCBI GI: 159039129 Blast Desc: Sare_3592 [Salinispora arenicola CNS-205] gi|157917964|gb|ABV99391.1| Sare_3592 [Salinispora arenicola CNS-205]
  misc_feature: Useful for conferring pesticidal activity to an organism
  misc_feature: Useful for controlling a pest organism
MKNKSTKVIVCALSALMVSPCISVAEESSLSNSNLNQKVLTPFTESYIDTVQNRMKQRDLESKITGKPINMQEQIIDGWFLARFWIFKDQNNNHQTNRFISWFKENLTIPNGYDRIAEQMGLKIEALNNMDVTNVDYKSKTGDTIYNGISELKNSTGTIQKMKTDSFQRDYTKSTSTSITNGLQVGFKVTAKGIVALAGADFETSVTYNLSSTDTETSTISDKFTVPSQEVTLPPGHKAVVKHDLRKMVYSGSHDLKGDLNITFNDKEIVQKFIYPNYRSINLSDIRKTMIEIDEWNNVKPVDFYQLVGVKNHIKNGDTLYIDTPAKFNFNGANPYYRATFTEYDGNGNPVKTKLLSENYKI

SEQ ID NO: 59 - DNA, 527 bp, Bacillus sp.
  misc_feature: SGI cDNA ID NO. SG1METG185109
  misc_feature: SGI cDNA ID NO. AGRMET1G146659
  misc_feature: Encodes the peptide sequence at SEQ ID NO 60
  misc_feature: Useful for conferring pesticidal activity to an organism
  misc_feature: Useful for controlling a pest organism
atgaaaagagggttaatatttatggcaattgttgatttagatgcatatttgttcgcattaatgaaaaaatctcatggtgacccagttagtgaatggttatatagagtagatacttcaaaattaaaagtcaaaaatgcagaaagctatggttttgaaattaaaaatagcaaacctcaaggaacgctgtttataggtgaatctgaacttgctaataaaacgaatgaaactcaaacaataaaatctgattcttttaccaaaacaatcactgattccataactctttcagtaacaaatggaataaaaactggaattgatataaatattggtgggaaagtctttggactgggcgtagaaacaagtatgtcgtttgaagttagtacaagtactaccagagaacaaacaagcacagaaagtgttgcatacacagtccctagccaagacgttgttgtacctccgcagtcaaaaagatatgtatatacttctctacaaagaagtcaattagatggaagtatccgcttaagagcaga

SEQ ID NO: 60 - protein, 175 aa, Bacillus sp.
  misc_feature: SGI Peptide ID NO. SG1METT185109
  misc_feature: SGI Peptide ID NO. AGRMET1T146659
  misc_feature (53)..(173): Pfam Id: PF03318 Pfam Desc: Clostridium epsilon toxin ETX/Bacillus mosquitocidal toxin MTX2
  misc_feature (56)..(175): NCBI GI: 85542860 Blast Desc: Sip1A [Bacillus thuringiensis]
  misc_feature (44)..(175): NCBI GI: 126653152 Blast Desc: BB14905_15435 [Bacillus sp. B14905] gi|126590068|gb|EAZ84194.1| BB14905_15435 [Bacillus sp. B14905]
  misc_feature (44)..(175): NCBI GI: 1302634 Blast Desc: 35.8-kilodalton mosquitocidal toxin [Lysinibacillus sphaericus] gi|1302636|gb|AAB36656.1| 35.8-kilodalton mosquitocidal toxin [Lysinibacillus sphaericus] 35.8-kilodalton
  misc_feature (44)..(175): NCBI GI: 1302638 Blast Desc: 35.8-kilodalton mosquitocidal toxin [Lysinibacillus sphaericus] gi|1302640|gb|AAB36658.1| 35.8-kilodalton mosquitocidal toxin [Lysinibacillus sphaericus] 35.8-kilodalton
  misc_feature (44)..(175): NCBI GI: 169828327 Blast Desc: mosquitocidal toxin gene [Lysinibacillus sphaericus C3-41] gi|168992815|gb|ACA40355.1| 35.8-kilodalton mosquitocidal toxin gene, complete cds [Lysinibacillus sphaericus C3-41]
  misc_feature (44)..(175): NCBI GI: 1302632 Blast Desc: 35.8-kilodalton mosquitocidal toxin [Lysinibacillus sphaericus]
  misc_feature (69)..(173): NCBI GI: 167461657 Blast Desc: Plarl_03715 [Paenibacillus larvae subsp. larvae BRL-230010]
  misc_feature (61)..(175): NCBI GI: 225166784 Blast Desc: pC2C203U28_p051 [Clostridium botulinum] gi|253771427|ref|YP_003034260.1| epsilon-toxin type B [Clostridium botulinum D str. 1873] gi|225007353|dbj|BAH29452.1|
  misc_feature (63)..(173): NCBI GI: 159037235 Blast Desc: Sare_1604 [Salinispora arenicola CNS-205] gi|157916070|gb|ABV97497.1| Sare_1604 [Salinispora arenicola CNS-205]
  misc_feature (9)..(175): NCBI GI: 228949369 Blast Desc: bthur0007_54850 [Bacillus thuringiensis serovar monterrey BGSC 4AJ1] gi|228810352|gb|EEM56710.1| bthur0007_54850 [Bacillus thuringiensis serovar monterrey BGSC 4AJ1]
  misc_feature: Useful for conferring pesticidal activity to an organism
  misc_feature: Useful for controlling a pest organism
MKRGLIFMAIVDLDAYLFALMKKSHGDPVSEWLYRVDTSKLKVKNAESYGFEIKNSKPQGTLFIGESELANKTNETQTIKSDSFTKTITDSITLSVTNGIKTGIDINIGGKVFGLGVETSMSFEVSTSTTREQTSTESVAYTVPSQDVVVPPQSKRYVYTSLQRSQLDGSIRLRA

SEQ ID NO: 61 - DNA, 978 bp, Bacillus sp.
  misc_feature: SGI cDNA ID NO. SG1METG203806
  misc_feature: SGI cDNA ID NO. AGRMET1G144343
  misc_feature: Encodes the peptide sequence at SEQ ID NO 62
  misc_feature: Useful for conferring pesticidal activity to an organism
  misc_feature: Useful for controlling a pest organism
atgcatgataccttaaaaatgtactctaatacaaaagaggaggatgaatgtatgaggaaaaatggcgtactgtttaaatggatgtgtagcttaacaattggtatggcgagcctaacaattggtggtttaaatacttctgcagatgaagtatcagattctttagcagatgtaggttttctctatggacgctatctctacgacactggtcagcatcaaaaagatacactacctattacctacccaatgagagaagtcaacaattataaaattattgataaatctgtttctcaaattggagatacaatatacgaagatggtccagctttgtttattggcactgatactcttgcaaatgaaacaaatgtagatcaagagttaaaaacaattcagtttgaaaaaacattaacagaatcagccacagcgacaaccacacattctgtaggtgtaggtatggaggaaagtgtaaaatttgatttctttattggtgagggttcagctaagtttacagtaaactataatttcaccaacacaagctctgatacaacaacagaatctattaaatatacgttgccttcgcaaacaattaaagtacctgctaatactaaatatcaggttcaatgcattctagaaactcaaaaagcaaaagctaacgttcaattaaacctcgatattcttggtaatgctaaatacgcgtataacaacactgcaccttacactcctttatacgaaagtggagctaatatggtaaaacttttgaatgatcaaaatcctggtcctgttgtttcatggttagataaagaatgggaaaaatgggagtataacaatggaaaagcaaggtacaaaaatggaaaaggtacagtttcagctgattatggtacgagaatgtaccttgtagttaaagatgtaacaaatactaaagcgagaagtggtaaagaaattgctagaatccctgttacaccaatcaaaaaacaaatctaa

SEQ ID NO: 62 - protein, 325 aa, Bacillus sp.
  misc_feature: SGI Peptide ID NO. SG1METT203806
  misc_feature: SGI Peptide ID NO. AGRMET1T144343
  misc_feature (91)..(303): Pfam Id: PF03318 Pfam Desc: Clostridium epsilon toxin ETX/Bacillus mosquitocidal toxin MTX2
  misc_feature (61)..(320): NCBI GI: 1302634 Blast Desc: 35.8-kilodalton mosquitocidal toxin [Lysinibacillus sphaericus] gi|1302636|gb|AAB36656.1| 35.8-kilodalton mosquitocidal toxin [Lysinibacillus sphaericus] 35.8-kilodalton
  misc_feature (61)..(320): NCBI GI: 1302638 Blast Desc: 35.8-kilodalton mosquitocidal toxin [Lysinibacillus sphaericus] gi|1302640|gb|AAB36658.1| 35.8-kilodalton mosquitocidal toxin [Lysinibacillus sphaericus] 35.8-kilodalton
  misc_feature (61)..(320): NCBI GI: 1302632 Blast Desc: 35.8-kilodalton mosquitocidal toxin [Lysinibacillus sphaericus]
  misc_feature (61)..(320): NCBI GI: 169828327 Blast Desc: mosquitocidal toxin gene [Lysinibacillus sphaericus C3-41] gi|168992815|gb|ACA40355.1| 35.8-kilodalton mosquitocidal toxin gene, complete cds [Lysinibacillus sphaericus C3-41]
  misc_feature (100)..(307): NCBI GI: 315150965 Blast Desc: conserved [Enterococcus faecalis TX0012]
  misc_feature (61)..(320): NCBI GI: 126653152 Blast Desc: BB14905_15435 [Bacillus sp. B14905] gi|126590068|gb|EAZ84194.1| BB14905_15435 [Bacillus sp. B14905]
  misc_feature (116)..(325): NCBI GI: 167461657 Blast Desc: Plarl_03715 [Paenibacillus larvae subsp. larvae BRL-230010]
  misc_feature (86)..(245): NCBI GI: 225166784 Blast Desc: pC2C203U28_p051 [Clostridium botulinum] gi|253771427|ref|YP_003034260.1| epsilon-toxin type B [Clostridium botulinum D str. 1873] gi|225007353|dbj|BAH29452.1|
  misc_feature (109)..(228): NCBI GI: 228949369 Blast Desc: bthur0007_54850 [Bacillus thuringiensis serovar monterrey BGSC 4AJ1] gi|228810352|gb|EEM56710.1| bthur0007_54850 [Bacillus thuringiensis serovar monterrey BGSC 4AJ1]
  misc_feature (109)..(321): NCBI GI: 228988874 Blast Desc: bthur0001_55080 [Bacillus thuringiensis serovar tochigiensis BGSC 4Y1] gi|228770867|gb|EEM19381.1| bthur0001_55080 [Bacillus thuringiensis serovar tochigiensis BGSC
  misc_feature: Useful for conferring pesticidal activity to an organism
  misc_feature: Useful for controlling a pest organism
MHDTLKMYSNTKEEDECMRKNGVLFKWMCSLTIGMASLTIGGLNTSADEVSDSLADVGFLYGRYLYDTGQHQKDTLPITYPMREVNNYKIIDKSVSQIGDTIYEDGPALFIGTDTLANETNVDQELKTIQFEKTLTESATATTTHSVGVGMEESVKFDFFIGEGSAKFTVNYNFTNTSSDTTTESIKYTLPSQTIKVPANTKYQVQCILETQKAKANVQLNLDILGNAKYAYNNTAPYTPLYESGANMVKLLNDQNPGPVVSWLDKEWEKWEYNNGKARYKNGKGTVSADYGTRMYLVVKDVTNTKARSGKEIARIPVTPIKKQI

SEQ ID NO: 63 - DNA, 919 bp, Bacillus sp.
  misc_feature: SGI cDNA ID NO. SG1METG215010
  misc_feature: SGI cDNA ID NO. AGRMET1G171428
  misc_feature: Encodes the peptide sequence at SEQ ID NO 64
  misc_feature: Useful for conferring pesticidal activity to an organism
  misc_feature: Useful for controlling a pest organism
atgaaaaaaattgtagttagaagttttttattgataggtatagcattaggaggaatcagtattacaaaacctatacacgcagagggcttacctggatcaataaatcaaccagcatggtctgaaatgcaaattggtatggggaaaatagcttattgtgccggatatggttatactggaccacgtgaatcgtggaactttcctattccatctgaaaatagaggaattaatcttgtgcaacaattctctcagggatatggaccgtatggcgtattacctacaaatcaatatgtagaactggcaggtgaacctgtgattcaagactctaaatcactttcggttggaaatagtactttaacaaatgaaactaatcaggaaatgaatatgaatactcctgaattttcatatgaaaaaacttattcgacaactaccactacaactaaagcattcgatttagggattaagcaaactgaaacaataaagatcccattagttgaacatcaaactgaaataagtgcaggattttcaatgagcaacacaggttctacagaagaaagtaccaaatcaacatatacagtaccgtctcaatctattccaacacttcctggtcattcatacaaggtagaatacatgttagctataggtaaggcatctgggaaagtgaatttttatggtgatgctacaggaacactaccaatattagatgcacctgaatatcatacattaggcttcttgggcgctggtgatgctttgagtattggtgaaaaaaatatttattatggagaccaatttaaagaatcttgggtaagaaaagacgagaaaaccatttcttacaaaggcggtcaagcaacttatgaagctgaatatggttatgactttttcatgaaagtaacggatactactacaaataatgttagaaatt

SEQ ID NO: 64 - protein, 306 aa, Bacillus sp.
  misc_feature: SGI Peptide ID NO. SG1METT215010
  misc_feature: SGI Peptide ID NO. AGRMET1T171428
  misc_feature (95)..(305): Pfam Id: PF03318 Pfam Desc: Clostridium epsilon toxin ETX/Bacillus mosquitocidal toxin MTX2
  misc_feature (100)..(206): Pfam Id: PF01117 Pfam Desc: Aerolysin toxin
  misc_feature (97)..(228): NCBI GI: 225166784 Blast Desc: pC2C203U28_p051 [Clostridium botulinum] gi|253771427|ref|YP_003034260.1| epsilon-toxin type B [Clostridium botulinum D str. 1873] gi|225007353|dbj|BAH29452.1|
  misc_feature (94)..(305): NCBI GI: 27525861 Blast Desc: epsilon toxin [Clostridium perfringens D]
  misc_feature (94)..(305): NCBI GI: 6433842 Blast Desc: epsilon toxin [Clostridium perfringens D]
  misc_feature (94)..(305): NCBI GI: 168210894 Blast Desc: epsilon-toxin [Clostridium perfringens B str. ATCC 3626] gi|182625455|ref|ZP_02953227.1| epsilon-toxin [Clostridium perfringens D str. JGS1721] gi|209947607|ref|YP_002291114.1| B D
  misc_feature (82)..(226): NCBI GI: 126653152 Blast Desc: BB14905_15435 [Bacillus sp. B14905] gi|126590068|gb|EAZ84194.1| BB14905_15435 [Bacillus sp. B14905]
  misc_feature (94)..(305): NCBI GI: 399461 Blast Desc: ETXB_CLOPE RecName: Full=Epsilon-toxin type B; Flags: Precursor gi|144804|gb|AAA23236.1| epsilon-toxin [Clostridium perfringens] gi|383773|prf||1904212A epsilon toxin
  misc_feature (94)..(305): NCBI GI: 294818250 Blast Desc: epsilon toxin [Clostridium perfringens D]
  misc_feature (94)..(305): NCBI GI: 315320199 Blast Desc: epsilon-toxin precursor [Clostridium perfringens D]
  misc_feature (94)..(305): NCBI GI: 52696089 Blast Desc: epsilon-toxin precursor [Clostridium perfringens D]
  misc_feature (82)..(226): NCBI GI: 1302632 Blast Desc: 35.8-kilodalton mosquitocidal toxin [Lysinibacillus sphaericus]
  misc_feature: Useful for conferring pesticidal activity to an organism
  misc_feature: Useful for controlling a pest organism
MKKIVVRSFLLIGIALGGISITKPIHAEGLPGSINQPAWSEMQIGMGKIAYCAGYGYTGPRESWNFPIPSENRGINLVQQFSQGYGPYGVLPTNQYVELAGEPVIQDSKSLSVGNSTLTNETNQEMNMNTPEFSYEKTYSTTTTTTKAFDLGIKQTETIKIPLVEHQTEISAGFSMSNTGSTEESTKSTYTVPSQSIPTLPGHSYKVEYMLAIGKASGKVNFYGDATGTLPILDAPEYHTLGFLGAGDALSIGEKNIYYGDQFKESWVRKDEKTISYKGGQATYEAEYGYDFFMKVTDTTTNNVRN

SEQ ID NO: 65 - DNA, 951 bp, Bacillus sp.
  misc_feature: SGI cDNA ID NO. SG1METG217783
  misc_feature: SGI cDNA ID NO. AGRMET1G174286
  misc_feature: Encodes the peptide sequence at SEQ ID NO 66
  misc_feature: Useful for conferring pesticidal activity to an organism
  misc_feature: Useful for controlling a pest organism
ttgaagaaaaagttgtttataacctctgcagcaatggccatttctctgacaagtttagaatctactacatcttttgctgctgaaaataatctgaaagttataattaacgaagaacaagtatctaagtctaatattactaatgtggatgaacaaatggataaaatttcaaattattattacaaaaatagtttgggaggaaaagatatcggaagttattatcgtatatatcgtcttgagagcaaaaaaaccaatatgtcgtttgacctaaatgccgatgaacctcaaaatttggtgtatactgatttacaaccagaatatataggggaaaatgaatttacgaataatttagaggaagaacaaacatttacaacagcgtcttattcaaaagcagtttcaaacactgtcagttccactgttacaaagggatttggagtagcaggcggagctaatattctgaagataccatttttattacctggtggaatacaaatgactacaaatattaatactagcaacagtactaccgagacgaacacaacaaccgaaacgcttaccgctccttcacaaaatattaaagtcccaggaggtaaaacatacagggtagaggtaaatcttcttaagaaaaacttcacaggagaagttgattttcagggaaaaggtactaatgtaagttcagatttaaaagtggctgcaatgtatattggcggtggattccctcgccctgatcaacatcctacctatacctatcagaccgccgatatgtggagaggtttaaattctactcaattagcagatattaaggatgtcaagtttgataaccaaaaaaatttaataattaatggtaaagcaaaaatagaaggtatttacggtagtaaattacaggttagtgtttatgacgttaccaataaaaaggaacctagattagtagaaatacgatataccaattattag

SEQ ID NO: 66 - protein, 316 aa, Bacillus sp.
  misc_feature: SGI Peptide ID NO. SG1METT217783
  misc_feature: SGI Peptide ID NO. AGRMET1T174286
  misc_feature (99)..(301): Pfam Id: PF03318 Pfam Desc: Clostridium epsilon toxin ETX/Bacillus mosquitocidal toxin MTX2
  misc_feature (45)..(312): NCBI GI: 169825571 Blast Desc: Mtx2/3 toxin-like protein [Lysinibacillus sphaericus C3-41] gi|169828676|ref|YP_001698834.1| Mtx2/3 toxin-like protein [Lysinibacillus sphaericus C3-41] gi|168993164|gb|ACA40704.1|
  misc_feature (100)..(312): NCBI GI: 228949369 Blast Desc: bthur0007_54850 [Bacillus thuringiensis serovar monterrey BGSC 4AJ1] gi|228810352|gb|EEM56710.1| bthur0007_54850 [Bacillus thuringiensis serovar monterrey BGSC 4AJ1]
  misc_feature (100)..(301): NCBI GI: 228988874 Blast Desc: bthur0001_55080 [Bacillus thuringiensis serovar tochigiensis BGSC 4Y1] gi|228770867|gb|EEM19381.1| bthur0001_55080 [Bacillus thuringiensis serovar tochigiensis BGSC
  misc_feature (112)..(314): NCBI GI: 167461657 Blast Desc: Plarl_03715 [Paenibacillus larvae subsp. larvae BRL-230010]
  misc_feature (1)..(303): NCBI GI: 1302634 Blast Desc: 35.8-kilodalton mosquitocidal toxin [Lysinibacillus sphaericus] gi|1302636|gb|AAB36656.1| 35.8-kilodalton mosquitocidal toxin [Lysinibacillus sphaericus] 35.8-kilodalton
  misc_feature (1)..(303): NCBI GI: 1302632 Blast Desc: 35.8-kilodalton mosquitocidal toxin [Lysinibacillus sphaericus]
  misc_feature (1)..(303): NCBI GI: 1302638 Blast Desc: 35.8-kilodalton mosquitocidal toxin [Lysinibacillus sphaericus] gi|1302640|gb|AAB36658.1| 35.8-kilodalton mosquitocidal toxin [Lysinibacillus sphaericus] 35.8-kilodalton
  misc_feature (1)..(216): NCBI GI: 228949857 Blast Desc: bthur0007_59420 [Bacillus thuringiensis serovar monterrey BGSC 4AJ1] gi|228809814|gb|EEM56232.1| bthur0007_59420 [Bacillus thuringiensis serovar monterrey BGSC 4AJ1]
  misc_feature (1)..(303): NCBI GI: 169828327 Blast Desc: mosquitocidal toxin gene [Lysinibacillus sphaericus C3-41] gi|168992815|gb|ACA40355.1| 35.8-kilodalton mosquitocidal toxin gene, complete cds [Lysinibacillus sphaericus C3-41]
  misc_feature (100)..(312): NCBI GI: 126653153 Blast Desc: BB14905_15440 [Bacillus sp. B14905] gi|126590069|gb|EAZ84195.1| BB14905_15440 [Bacillus sp. B14905]
  misc_feature: Useful for conferring pesticidal activity to an organism
  misc_feature: Useful for controlling a pest organism
MKKKLFITSAAMAISLTSLESTTSFAAENNLKVIINEEQVSKSNITNVDEQMDKISNYYYKNSLGGKDIGSYYRIYRLESKKTNMSFDLNADEPQNLVYTDLQPEYIGENEFTNNLEEEQTFTTASYSKAVSNTVSSTVTKGFGVAGGANILKIPFLLPGGIQMTTNINTSNSTTETNTTTETLTAPSQNIKVPGGKTYRVEVNLLKKNFTGEVDFQGKGTNVSSDLKVAAMYIGGGFPRPDQHPTYTYQTADMWRGLNSTQLADIKDVKFDNQKNLIINGKAKIEGIYGSKLQVSVYDVTNKKEPRLVEIRYTNY

SEQ ID NO: 67 - DNA, 2788 bp, Bacillus sp.
  misc_feature: SGI cDNA ID NO. SG1METG47259
  misc_feature: SGI cDNA ID NO. AGRMET1G167120
  misc_feature: Encodes the peptide sequence at SEQ ID NO 68
  misc_feature: Useful for conferring pesticidal activity to an organism
  misc_feature: Useful for controlling a pest organism
atgagtccaaataatcaaaatgaatatgaaattatagatgcgacaccttctacatctgtatccaatgattctaacagatacccttttgcgaatgagccaacagatgcgttacaaaatatgaattataaagattatttaaaaatgtctgcgggaaatgttagtgaataccctggttcacctgaggtatttctaagcgagcaagatgcagttaaggccgcaattgatatagtaggtaaattactaacaggtttaggggttccatttgttgggccgatagtgagtctttatactcaacttattgatattctgtggccttcaaaacaaaagagtcaatgggaaatttttatggaacaagtagaagaactcattaatcaaaaaatagcagaatatgcaaggaataaagcgctttcggaattggaagggctagggaataattaccaattatatctaactgcgcttgaagagtggaaagaaaatccaaatggttcaagagccttacgagatgttcgaaatcgatttgaaatcctggatagtttatttacgcaatatatgccatcttttcgagtgacaaattttgaagtaccattccttacagtatatacaatggcagcaaacctacatttacttttattaagggacgcatcaatttttggagaagaatggggatggtctacaagcactattaataactactataatcgtcaaatgaaacttactgcagaatattctgaccactgtgtaaagtggtatgaaactggtttagcaaaattaaaaggctcgagcgctaaacaatggattgactataaccaattccgtagagaaatgacattgacggtgttagacgttgttgcattattttcaaactatgatacgcgtacgtatccactggcaacaacagctcagcttacaagggaagtatatacagatccacttggcgcggtagatgtgcctaatattggctcctggtatgacaaagcaccttctttctcagaaatagaaaaagcggctattcgtccacctcatatgtttgattatataacgggactcacagtttatacaaaaaaacgtagcttcacttctgatcgttatatgagatattgggctggtcatcaaataagctataagaatatcggtacgagtagtacctttacacagatgtatggaaccaatcaaaatttacaaagtactagcaattttgattttacgaattacgatatttacaagactttatcaaataatgcagtactccttgatatagtttaccctggttatacgtatacatttttgggaatgccagaaaccgagttttttatggtaaatcaattgaataataccagaaagacgttaacgtataaaccagcttccaaagatattatagatcggacaagagattcggaattagaattgcctccagaaacttcaggtcaaccaaattacgagtcatatagccatagattaggtcatattacatttatttactccagttcaactagcacgtatgtacctgtattttcttggacacatcggagtgcagatctaacaaatacagttaaaagtggcgaaatcacccaaataccagggggcaagtctagcgccataggcagaaatacttatataataaaagggcgtggttatacagggggagacttattggctttaacggaccgcatcggaagttgtgagtttcagatgatctttccagagtctcaacgattccgtattcggattcgttacgcttctaatgaaactagttatattagtttatacggactaaaccaaagcggaactttaaaattcaaccagacatattctaataaaaatgaaaatgatttaacatataatgatttcaaatatatagaatatccaagagtcatttcagtaaatgcttcttcaaacatacagaggttatctataagtatacaaacgaatacaaatttatttattttagaccgaatcgaattcatcccagtagatgagacatatgaagcggaaacggatttagaagcggcaaagaaagcagtgaatgccttgtttacgaatacaaaagatggattacagccaggtgtaacggattatgaagtaaatcaagcggccaacttagtggaatgcctatcggatgatttgtatccaaatgaaaaacgattgttatttgatgcagtgagagaggcaaaacgacttagcgaggcacggaacttactacaagatccagatttccaagagataaatggagaaaatggatggacggcaagtacgggaattgaggttatagaaggggatgctgtattcaaagggcgttatctacgcctaccaggtgcgagagaaatagatacggaaacgtatccaacgtatctgtatcaaaaagtagaggaaggtgtattaaaaccatacacaaggtatagactgagaggatttgtgggaagtagtcaaggattagaaatttatacgattcgtcaccaaacgaatcgaattgtaaaaaatgtaccagatgatttactgccagatgtacctcctgtaaacaatgatggtagaatcaatcgatgcagcgaacaaaagtatgtgaatagtcgtttagaagtagaaaaccgttctggtgaagcgcatgagttctcaatccctatcgatacaggagagctggattacaatgaaaatgcaggaatatgggttggatttaagattacggacccagagggatacgcaacacttggaaatcttgaattggtcgaagagggacctttgtcaggagacgcattagaacgcttgcaaaaagaagaacaacagtggaagattc

SEQ ID NO: 68 - protein, 929 aa, Bacillus sp.
  misc_feature: SGI Peptide ID NO. SG1METT47259
  misc_feature: SGI Peptide ID NO. AGRMET1T167120
  misc_feature (70)..(293): Pfam Id: PF03945 Pfam Desc: delta endotoxin, N-terminal domain
  misc_feature (522)..(658): Pfam Id: PF03944 Pfam Desc: delta endotoxin
  misc_feature (298)..(512): Pfam Id: PF00555 Pfam Desc: delta endotoxin
  misc_feature (1)..(929): NCBI GI: 8928019 Blast Desc: CR8BA_BACUK RecName: Full=Pesticidal crystal protein cry8Ba; AltName: Full=134 kDa crystal protein; AltName: Full=Crystaline entomocidal protoxin; AltName: Full=Insecticidal
  misc_feature (1)..(929): NCBI GI: 67973231 Blast Desc: Cry8 [Bacillus thuringiensis]
  misc_feature (1)..(929): NCBI GI: 34495248 Blast Desc: Cry8Ea1 [Bacillus thuringiensis]
  misc_feature (1)..(929): NCBI GI: 158021542 Blast Desc: crystal protein [Bacillus thuringiensis]
  misc_feature (1)..(929): NCBI GI: 8928018 Blast Desc: CR8AA_BACUK RecName: Full=Pesticidal crystal protein cry8Aa; AltName: Full=131 kDa crystal protein; AltName: Full=Crystaline entomocidal protoxin; AltName: Full=Insecticidal
  misc_feature (1)..(929): NCBI GI: 158021540 Blast Desc: insecticidal crystal protein [Bacillus thuringiensis]
  misc_feature (1)..(929): NCBI GI: 49035989 Blast Desc: Cry8X [Bacillus thuringiensis]
  misc_feature (1)..(929): NCBI GI: 307697880 Blast Desc: insecticidal crystal protein [Bacillus thuringiensis]
  misc_feature (1)..(929): NCBI GI: 225348557 Blast Desc: Cry8Ka2 delta-endotoxin [Bacillus thuringiensis serovar kenyae]
  misc_feature (1)..(929): NCBI GI: 83743080 Blast Desc: toxin pbt145-1 [Bacillus thuringiensis] gi|213958617|gb|ACJ54705.1| spherical crystal protein [Bacillus thuringiensis]
  misc_feature: Useful for conferring pesticidal activity to an organism
  misc_feature: Useful for controlling a pest organism
MSPNNQNEYEIIDATPSTSVSNDSNRYPFANEPTDALQNMNYKDYLKMSAGNVSEYPGSPEVFLSEQDAVKAAIDIVGKLLTGLGVPFVGPIVSLYTQLIDILWPSKQKSQWEIFMEQVEELINQKIAEYARNKALSELEGLGNNYQLYLTALEEWKENPNGSRALRDVRNRFEILDSLFTQYMPSFRVTNFEVPFLTVYTMAANLHLLLLRDASIFGEEWGWSTSTINNYYNRQMKLTAEYSDHCVKWYETGLAKLKGSSAKQWIDYNQFRREMTLTVLDVVALFSNYDTRTYPLATTAQLTREVYTDPLGAVDVPNIGSWYDKAPSFSEIEKAAIRPPHMFDYITGLTVYTKKRSFTSDRYMRYWAGHQISYKNIGTSSTFTQMYGTNQNLQSTSNFDFTNYDIYKTLSNNAVLLDIVYPGYTYTFLGMPETEFFMVNQLNNTRKTLTYKPASKDIIDRTRDSELELPPETSGQPNYESYSHRLGHITFIYSSSTSTYVPVFSWTHRSADLTNTVKSGEITQIPGGKSSAIGRNTYIIKGRGYTGGDLLALTDRIGSCEFQMIFPESQRFRIRIRYASNETSYISLYGLNQSGTLKFNQTYSNKNENDLTYNDFKYIEYPRVISVNASSNIQRLSISIQTNTNLFILDRIEFIPVDETYEAETDLEAAKKAVNALFTNTKDGLQPGVTDYEVNQAANLVECLSDDLYPNEKRLLFDAVREAKRLSEARNLLQDPDFQEINGENGWTASTGIEVIEGDAVFKGRYLRLPGAREIDTETYPTYLYQKVEEGVLKPYTRYRLRGFVGSSQGLEIYTIRHQTNRIVKNVPDDLLPDVPPVNNDGRINRCSEQKYVNSRLEVENRSGEAHEFSIPIDTGELDYNENAGIWVGFKITDPEGYATLGNLELVEEGPLSGDALERLQKEEQQWKI

SEQ ID NO: 69 - DNA, 2413 bp, Bacillus sp.
  misc_feature: SGI cDNA ID NO. SG1METG47235
  misc_feature: SGI cDNA ID NO. AGRMET1G188888
  misc_feature: Encodes the peptide sequence at SEQ ID NO 70
  misc_feature: Useful for conferring pesticidal activity to an organism
  misc_feature: Useful for controlling a pest organism
ttaggggttccatttgctagtcagatagctagtttctatagtttcattgttggtcaattatggccgtcaaagagcgtagatatatggggagaaattatggaacgagtggaagaactcgttgatcaaaaaatagaaaaatatgtaaaagataaggctcttgctgaattaaaagggctaggaaatgctttggatgtatatcagcagtcacttgaagattggctggaaaatcgcaatgatgcaagaactagaagtgttgtttctaatcaatttatagctttagatcttaactttgttagttcaattccatcttttgcagtatccggacacgaagtactattattagcagtatatgcacaggctgtgaacctacatttattgttattaagagatgcttctatttttggagaagagtggggatttacaccaggtgaaatttctagattttataatcgtcaagtgcaacttaccgctgaatattcagactattgtgtaaagtggtataaaatcggcttagataaattgaaaggtaccacttctaaaagttggctgaattatcatcagttccgtagagagatgacattactggtattagatttggtggcgttatttccaaactatgacacacatatgtatccaatcgaaacaacagctcaacttacacgggatgtgtatacagatccgatagcatttaacatagtgacaagtactggattctgcaacccttggtcaacccacagtggtattcttttttatgaagttgaaaacaacgtaattcgtccgccacacttgtttgatatactcagctcagtagaaattaatacaagtagagggggtattacgttaaataatgatgcatatataaactactggtcaggacataccctaaaatatcgtagaacagctgattcgaccgtaacatacacagctaattacggtcgaatcacttcagaaaagaattcatttgcacttgaggatagggatatttttgaaattaattcaactgtggcaaacctagctaattactaccaaaaggcatatggtgtgccgggatcttggttccatatggtaaaaaggggaacctcatcaacaacagcgtatttatattcaaaaacacatacagctctccaagggtgtacacaggtttatgaatcaagtgatgaaatacctctagatagaactgtaccggtagctgaaagctatagtcatagattatctcatattacctcccattctttctctaaaaatgggagtgcatactatgggagtttccctgtatttgtttggacacatactagtgcggatttaaataatacaatatattcagataaaatcactcaaattccagcggtaaagggagacatgttatatctagggggttccgtagtacagggtcctggatttacaggaggagatatattaaaaagaaccaatcctagcatattagggacctttgcggttacagtaaatgggtcgttatcacaaagatatcgtgtaagaattcgctatgcctctacaacagattttgaatttactctataccttggcgacacaatggaaaaaaatagatttaacaaaactatggataatggggcatctttaacgtatgaaacatttaaattcgcaagtttcattactgatttccaattcagagaaacacaagataaaatactcctatccatgggtgattttagctccggtcaagaagtttatatagaccgaatcgaattcatcccagtagatgagacatatgaggcggaacaagatttagaagcggcgaagaaagcagtgaatgccttgtttacgaatacaaaagatggcttacgaccaggtgtaacggattatgaagtaaatcaagcggcaaacttagtggaatgcctatcggatgatttatatccaaatgaaaaacgattgttatttgatgcggtgagagaggcaaaacgcctcagtggggcacgtaacttactacaagatccagatttccaagagataaacggagaaaatggatgggcggcaagtacgggaattgagattgtagaaggggatgctgtatttaaaggacgttatctacgcctaccaggtgcacgagaaattgatacggaaacgtatccaacgtatctgtatcaaaaagtagaggaaggtgtattaaaaccatacacaagatatagactgagagggtttgtgggaagtagtcaaggattagaaatttatacgatacgtcaccaaacgaatcgaattgtaaagaatgtaccagatgatttattgccagatgtatctcctgtaaactctgatggcagtatcaatcgatgcagcgaacaaaagtatgtgaatagccgtttagaaggagaaaaccgttctggtgatgcacatgagttctcgctccctatcgatataggagagctggattacaatgaaa

SEQ ID NO: 70 - protein, 804 aa, Bacillus sp.
  misc_feature: SGI Peptide ID NO. SG1METT47235
  misc_feature: SGI Peptide ID NO. AGRMET1T188888
  misc_feature (2)..(209): Pfam Id: PF03945 Pfam Desc: delta endotoxin, N-terminal domain
  misc_feature (444)..(580): Pfam Id: PF03944 Pfam Desc: delta endotoxin
  misc_feature (215)..(434): Pfam Id: PF00555 Pfam Desc: delta endotoxin
  misc_feature (1)..(804): NCBI GI: 228911559 Blast Desc: Pesticidal crystal protein cry1Bc [Bacillus thuringiensis IBL 200] gi|228848062|gb|EEM92927.1| Pesticidal crystal protein cry1Bc [Bacillus thuringiensis IBL 200]
  misc_feature (1)..(804): NCBI GI: 9087135 Blast Desc: CR7AB_BACUK RecName: Full=Pesticidal crystal protein cry7Ab; AltName: Full=130 kDa crystal protein; AltName: Full=Crystaline entomocidal protoxin; AltName: Full=Insecticidal
  misc_feature (1)..(804): NCBI GI: 8469145 Blast Desc: CR1BB_BACTU RecName: Full=Pesticidal crystal protein cry1Bb; AltName: Full=140 kDa crystal protein; AltName: Full=Crystaline entomocidal protoxin; AltName: Full=Insecticidal
  misc_feature (1)..(804): NCBI GI: 228950175 Blast Desc: Pesticidal crystal protein cry7Aa [Bacillus thuringiensis serovar monterrey BGSC 4AJ1] gi|228809514|gb|EEM55953.1| Pesticidal crystal protein cry7Aa
  misc_feature (1)..(804): NCBI GI: 209364666 Blast Desc: insecticidal crystal protein [Bacillus thuringiensis]
  misc_feature (1)..(804): NCBI GI: 8469158 Blast Desc: CR7AA_BACTU RecName: Full=Pesticidal crystal protein cry7Aa; AltName: Full=129 kDa crystal protein; AltName: Full=Crystaline entomocidal protoxin; AltName: Full=Insecticidal
  misc_feature (1)..(804): NCBI GI: 8469150 Blast Desc: CR1BC_BACTM RecName: Full=Pesticidal crystal protein cry1Bc; AltName: Full=140 kDa crystal protein; AltName: Full=Crystaline entomocidal protoxin; AltName: Full=Insecticidal
  misc_feature (1)..(804): NCBI GI: 9087134 Blast Desc: CR7AB_BACUA RecName: Full=Pesticidal crystal protein cry7Ab; AltName: Full=130 kDa crystal protein; AltName: Full=Crystaline entomocidal protoxin; AltName: Full=Insecticidal
  misc_feature (1)..(804): NCBI GI: 8927979 Blast Desc: CR1BE_BACTU RecName: Full=Pesticidal crystal protein cry1Be; AltName: Full=139 kDa crystal protein; AltName: Full=Crystaline entomocidal protoxin; AltName: Full=Insecticidal
  misc_feature (1)..(804): NCBI GI: 8928018 Blast Desc: CR8AA_BACUK RecName: Full=Pesticidal crystal protein cry8Aa; AltName: Full=131 kDa crystal protein; AltName: Full=Crystaline entomocidal protoxin; AltName: Full=Insecticidal
  misc_feature: Useful for conferring pesticidal activity to an organism
  misc_feature: Useful for controlling a pest organism
LGVPFASQIASFYSFIVGQLWPSKSVDIWGEIMERVEELVDQKIEKYVKDKALAELKGLGNALDVYQQSLEDWLENRNDARTRSVVSNQFIALDLNFVSSIPSFAVSGHEVLLLAVYAQAVNLHLLLLRDASIFGEEWGFTPGEISRFYNRQVQLTAEYSDYCVKWYKIGLDKLKGTTSKSWLNYHQFRREMTLLVLDLVALFPNYDTHMYPIETTAQLTRDVYTDPIAFNIVTSTGFCNPWSTHSGILFYEVENNVIRPPHLFDILSSVEINTSRGGITLNNDAYINYWSGHTLKYRRTADSTVTYTANYGRITSEKNSFALEDRDIFEINSTVANLANYYQKAYGVPGSWFHMVKRGTSSTTAYLYSKTHTALQGCTQVYESSDEIPLDRTVPVAESYSHRLSHITSHSFSKNGSAYYGSFPVFVWTHTSADLNNTIYSDKITQIPAVKGDMLYLGGSVVQGPGFTGGDILKRTNPSILGTFAVTVNGSLSQRYRVRIRYASTTDFEFTLYLGDTMEKNRFNKTMDNGASLTYETFKFASFITDFQFRETQDKILLSMGDFSSGQEVYIDRIEFIPVDETYEAEQDLEAAKKAVNALFTNTKDGLRPGVTDYEVNQAANLVECLSDDLYPNEKRLLFDAVREAKRLSGARNLLQDPDFQEINGENGWAASTGIEIVEGDAVFKGRYLRLPGAREIDTETYPTYLYQKVEEGVLKPYTRYRLRGFVGSSQGLEIYTIRHQTNRIVKNVPDDLLPDVSPVNSDGSINRCSEQKYVNSRLEGENRSGDAHEFSLPIDIGELDYNE

SEQ ID NO: 71 - DNA, 894 bp, Bacillus sp.
  misc_feature: SGI cDNA ID NO. SG1METG47198
  misc_feature: SGI cDNA ID NO. AGRMET1G151952
  misc_feature: Encodes the peptide sequence at SEQ ID NO 72
  misc_feature: Useful for conferring pesticidal activity to an organism
  misc_feature: Useful for controlling a pest organism
gcaacaaatatttatatttttttattaaatgtcataagcttagataataaatatctaaatgattataataatattagtaaaatggatttttttataactaatggtactagacttttggagaaagaacttacagcaggatctgggcaaataacttatgatgtaaataaaaatattttcgggttaccaattcttaaacgaagagagaatcaaggaaaccctaccctttttccaacatatgataactatagtcatattttatcatttattaaaagtcttagtatccctgcaacatataaaactcaagtgtatacgtttgcttggacacactctagtgttgatcctaaaaatacaatttatacacatttaactacccaaattccagctgtaaaagcgaattcacttgggactgcttctaaggttgttcaaggacctggtcatacaggaggggatttaattgatttcaaagatcatttcaaaattacatgtcaacactcaaattttcaacaatcgtattttataagaattcgttatgcttcaaatggaagcgcaaatactcgggctgttagaaatcttagtatcccaggggtagcagaactgggtatggcactcaaccccactttttctggtacagattatacgaatttaaaatataaagattttcagtacttagaattttctaacgaggtgaaatttgctccaaatcaaaacatatctcttgtgtttaatcgttcggatgtatatacaaacacaacagtacttattgataaaattgaatttctgccaattactcgttctataagagaggatagagagaaacaaaaattagaaacagtacaacaaataattaatacattttatgcaaatcctataaaaaacactttacaatcagaactt

SEQ ID NO: 72 - protein, 298 aa, Bacillus sp.
  misc_feature: SGI Peptide ID NO. SG1METT47198
  misc_feature: SGI Peptide ID NO. AGRMET1T151952
  misc_feature (124)..(263): Pfam Id: PF03944 Pfam Desc: delta endotoxin
  misc_feature (2)..(113): Pfam Id: PF00555 Pfam Desc: delta endotoxin
  misc_feature (1)..(298): NCBI GI: 161598618 Blast Desc: pesticidial crystal protein cry4AA [Bacillus thuringiensis serovar israelensis] gi|117544|sp|P16480.1|CR4AA_BACTI RecName: Full=Pesticidal kDa
  misc_feature (1)..(298): NCBI GI: 40352 Blast Desc: protein product [Bacillus thuringiensis]
  misc_feature (1)..(298): NCBI GI: 124263655 Blast Desc: Cry4A [Bacillus thuringiensis]
  misc_feature (1)..(298): NCBI GI: 148787937 Blast Desc: Cry4A [Bacillus thuringiensis]
  misc_feature (1)..(298): NCBI GI: 148787933 Blast Desc: Cry4A [Bacillus thuringiensis]
  misc_feature (1)..(298): NCBI GI: 148787929 Blast Desc: Cry4A [Bacillus thuringiensis]
  misc_feature (1)..(298): NCBI GI: 148787931 Blast Desc: Cry4A [Bacillus thuringiensis] gi|148787935|gb|ABR12217.1| Cry4A [Bacillus thuringiensis]
  misc_feature (1)..(281): NCBI GI: 87887911 Blast Desc: cry4A [Bacillus thuringiensis]
  misc_feature (28)..(298): NCBI GI: 76364130 Blast Desc: cry4A [Bacillus thuringiensis]
  misc_feature (1)..(264): NCBI GI: 99031923 Blast Desc: cry4A [Bacillus thuringiensis]
  misc_feature: Useful for conferring pesticidal activity to an organism
  misc_feature: Useful for controlling a pest organism
ATNIYIFLLNVISLDNKYLNDYNNISKMDFFITNGTRLLEKELTAGSGQITYDVNKNIFGLPILKRRENQGNPTLFPTYDNYSHILSFIKSLSIPATYKTQVYTFAWTHSSVDPKNTIYTHLTTQIPAVKANSLGTASKVVQGPGHTGGDLIDFKDHFKITCQHSNFQQSYFIRIRYASNGSANTRAVRNLSIPGVAELGMALNPTFSGTDYTNLKYKDFQYLEFSNEVKFAPNQNISLVFNRSDVYTNTTVLIDKIEFLPITRSIREDREKQKLETVQQIINTFYANPIKNTLQSEL

SEQ ID NO: 73 - DNA, 2171 bp, Bacillus sp.
  misc_feature: SGI cDNA ID NO. SG1METG47359
  misc_feature: SGI cDNA ID NO. AGRMET1G218472
  misc_feature: Encodes the peptide sequence at SEQ ID NO 74
  misc_feature: Useful for conferring pesticidal activity to an organism
  misc_feature: Useful for controlling a pest organism
atgggaggaacaaatatgaatccttatcaaaataaaaatgaatatgaaacattaaatgcttcacaaaaaaaattaaatatatctaataattatacaagatatccaatagaaaatagtccaaaacaattattacaaagtacaaattataaagattggctcaatatgtgtcaacagaatcagcagtatggtggagattttgaaacttttattgatagtggtgaactcagtgcctatactattgtagttgggaccgtactgactggtttcgggttcacaacacccttaggacttgctttaataggttttggtacattaataccagttctttttccagcccaagaccaatctaacacatggagtgactttataacacaaactaaaaatattataaaaaaagaaatagcatcaacatatataagtaatgctaataaaattttaaacaggtcgtttaatgttatcagcacttatcataatcaccttaaaacatgggagaataatccaaacccacaaaatactcaggatgtaaggacacaaatccagctagttcattaccattttcaaaatgtcattccagagcttgtaaactcttgtcctcctaatcctagtgattgcgattactataacatactagtattatctagttatgcacaagcagcaaacttacatctgactgtattaaatcaagccgtcaaatttgaagcgtatttaaaaaacaatcgacaattcgattatttagagcctttgccaacagcaattgattattatccagtattgactaaagctatagaagattacactaattattgtgtaacaacttataaaaaaggattaaatttaattaaaacgacgcctgatagtaatcttgatggaaatataaactggaacacatacaatacgtatcgaacaaaaatgactactgctgtattagatcttgttgcactctttcctaattatgatgtaggtaaatatccaataggtgtccaatctgaacttactcgagaaatttatcaggtacttaacttcgaagaaagcccctataaatattatgactttcaatatcaagaggattcacttacacgtagaccgcatttatttacttggcttgattctttgaatttttatgaaaaagcgcaaactactcctaataattttttcaccagccattataatatgtttcattacacacttgataatatatcccaaaaatctagtgtttttggaaatcacaatgtaactgataaattaaaatctcttggtttggcaacaaatatttatatttttttattaaatgtcataagcttagataataaatatctaaatgattataataatattagtaaaatggatttttttataactaatggtactagacttttggagaaagaacttacagcaggatctgggcaaataacttatgatgtaaataaaaatattttcgggttaccaattcttaaacgaagagagaatcaaggaaaccctaccctttttccaacatatgataactatagtcatattttatcatttattaaaagtcttagtatccctgcaacatataaaactcaagtgtatacgtttgcttggacacactctagtgttgatcctaaaaatacaatttatacacatttaactacccaaattccagctgtaaaagcgaattcacttgggactgcttctaaggttgttcaaggacctggtcatacaggaggggatttaattgatttcaaagatcatttcaaaattacatgtcaacactcaaattttcaacaatcgtattttataagaattcgttatgcttcaaatggaagcgcaaatactcgagctgttataaatcttagtatcccaggggtagcagaactgggtatggcactcaaccccactttttctggtacagattatacgaatttaaaatataaagattttcagtacttagaattttctaacgaggtgaaatttgctccaaatcaaaacatatctcttgtgtttaatcgttcggatgtatatacaaacacaacagtacttattgataaaattgaatttctgccaattactcgttctataagagaggatagagagaaacaaaaattagaaacagtacaacaaataattaatacattttatgcaaatcctataaaaaacactttacaatcagaacttacagattatgacataga

SEQ ID NO: 74 - protein, 723 aa, Bacillus sp.
  misc_feature: SGI Peptide ID NO. SG1METT47359
  misc_feature: SGI Peptide ID NO. AGRMET1T218472
  misc_feature (76)..(321): Pfam Id: PF03945 Pfam Desc: delta endotoxin, N-terminal domain
  misc_feature (544)..(683): Pfam Id: PF03944 Pfam Desc: delta endotoxin
  misc_feature (327)..(533): Pfam Id: PF00555 Pfam Desc: delta endotoxin
  misc_feature (6)..(723): NCBI GI: 161598618 Blast Desc: pesticidial crystal protein cry4AA [Bacillus thuringiensis serovar israelensis] gi|117544|sp|P16480.1|CR4AA_BACTI RecName: Full=Pesticidal kDa
  misc_feature (6)..(723): NCBI GI: 40352 Blast Desc: protein product [Bacillus thuringiensis]
  misc_feature (6)..(723): NCBI GI: 124263655 Blast Desc: Cry4A [Bacillus thuringiensis]
  misc_feature (6)..(723): NCBI GI: 148787933 Blast Desc: Cry4A [Bacillus thuringiensis]
  misc_feature (6)..(723): NCBI GI: 148787929 Blast Desc: Cry4A [Bacillus thuringiensis]
  misc_feature (6)..(723): NCBI GI: 148787937 Blast Desc: Cry4A [Bacillus thuringiensis]
  misc_feature (6)..(723): NCBI GI: 148787931 Blast Desc: Cry4A [Bacillus thuringiensis] gi|148787935|gb|ABR12217.1| Cry4A [Bacillus thuringiensis]
  misc_feature (6)..(701): NCBI GI: 87887911 Blast Desc: cry4A [Bacillus thuringiensis]
  misc_feature (73)..(684): NCBI GI: 99031923 Blast Desc: cry4A [Bacillus thuringiensis]
  misc_feature (448)..(723): NCBI GI: 76364130 Blast Desc: cry4A [Bacillus thuringiensis]
  misc_feature: Useful for conferring pesticidal activity to an organism
  misc_feature: Useful for controlling a pest organism
MGGTNMNPYQNKNEYETLNASQKKLNISNNYTRYPIENSPKQLLQSTNYKDWLNMCQQNQQYGGDFETFIDSGELSAYTIVVGTVLTGFGFTTPLGLALIGFGTLIPVLFPAQDQSNTWSDFITQTKNIIKKEIASTYISNANKILNRSFNVISTYHNHLKTWENNPNPQNTQDVRTQIQLVHYHFQNVIPELVNSCPPNPSDCDYYNILVLSSYAQAANLHLTVLNQAVKFEAYLKNNRQFDYLEPLPTAIDYYPVLTKAIEDYTNYCVTTYKKGLNLIKTTPDSNLDGNINWNTYNTYRTKMTTAVLDLVALFPNYDVGKYPIGVQSELTREIYQVLNFEESPYKYYDFQYQEDSLTRRPHLFTWLDSLNFYEKAQTTPNNFFTSHYNMFHYTLDNISQKSSVFGNHNVTDKLKSLGLATNIYIFLLNVISLDNKYLNDYNNISKMDFFITNGTRLLEKELTAGSGQITYDVNKNIFGLPILKRRENQGNPTLFPTYDNYSHILSFIKSLSIPATYKTQVYTFAWTHSSVDPKNTIYTHLTTQIPAVKANSLGTASKVVQGPGHTGGDLIDFKDHFKITCQHSNFQQSYFIRIRYASNGSANTRAVINLSIPGVAELGMALNPTFSGTDYTNLKYKDFQYLEFSNEVKFAPNQNISLVFNRSDVYTNTTVLIDKIEFLPITRSIREDREKQKLETVQQIINTFYANPIKNTLQSELTDYDI

SEQ ID NO: 75 - DNA, 2043 bp, Bacillus sp.
  misc_feature: SGI cDNA ID NO. SG1METG47296
  misc_feature: SGI cDNA ID NO. AGRMET1G177567
  misc_feature: Encodes the peptide sequence at SEQ ID NO 76
  misc_feature: Useful for conferring pesticidal activity to an organism
  misc_feature: Useful for controlling a pest organism
atgggaggaatagatatgaatccatatcaaaataagaatgaatatgaaatattcaatgctccatccaatggttttagcaagtctaataactattctagatatccattagcaaataagccaaatcaaccactgaaaaacacgaattacaaagattggctcaatgtgtgtcaagataatcaacaatatggcaataatgcggggaattttgctagttctgaaactattgttggagttagtgcaggtattattgtagtaggaactatgttaggagcttttgctgcccctgtcttagctgcaggtataatatcttttgggactttgttgccgatcttttggcaaggatctgaccctgcaaatgtttggcaggatttgttaaacatcggaggaaggcctatacaagaaatagataaaaacataattaatgtactaacttctatcgtaacacctataaaaaatcaacttgataaatatcaagaatttttcgataaatgggagccagcacgtacacacgctaatgctaaagcagtacatgatctctttactaccttagaacctataatagataaagatttagatatgttaaaaaataatgctagctatcgaataccaacactccctgcatatgcacaaatagctacttggcacttgaatttattaaaacatgctgctacctattacaatatatggctgcaaaatcaaggtataaatccaagtactttcaattcatctaattactatcagggctatttaaaacgtaaaatacaagaatatactgactattgtatacaaacgtacaatgcaggactaactatgattagaactaatactaacgcaacatggaatatgtataatacttaccgtttagaaatgactctaactgtgttagatcttattgctatttttccaaattatgacccagaaaaatatccaataggagttaaatctgaacttatcagagaagtttatacgaatgttaattcagatacatttagaaccataacagaactagaaaatggattaactagaaatcctacattatttacttggataaaccaagggcgtttttacacaagaaattctcgagacattcttgatccttatgatattttttcttttacaggtaaccagatggcctttacacatactaatgatgatcgcaacataatctggggagcggttcatggaaatattatttctcaagacacatccaaagtatttcctttttatagaaacaaacctattgataaggtcgaaattgtcagacatagagagtactcagatataatatatgaaatgatatttttttcgaatagcagtgaagtatttcgatattcatccaattcaacaatagaaaataattataaaagaactgattcttatatgattccaaaacaaacatggaaaaataaagaatatggtcatactctatcgtatataaaaactgataattatatattttcagtagttagagaaagaagaagagttgcatttagttggacacatactagtgttgatttccaaaatacaatagatttagataacatcacccaaatccacgctctaaaagctttgaaggtaagttctgattcgaaaattgtgaaaggtcctggtcacacaggtggagacttggtaattcttaaagatagtatggattttagagttagatttttaaaaaatgtttctcgacaatatcaagtacgtattcgttatgctactaatgctccaaagacaacagtattcttaaccggaatagatactataagtgtggagctccctagtaccacttcccgccaaaacccaaatgctacagatttaacatatgcagattttggatatgtaacatttccaagaacagttccaaataaaacatttgaaggagaagacactttattaatgaccttatatggtacaccaaatcattcatataatatatatattgacaaaatcgaatttattccaatcactcaatctgtattagattatacagagaagcaaaatatagaaaaaacacagaaaatagtgaatgatttatttgttaattaa

SEQ ID NO: 76 - protein, 680 aa, Bacillus sp.
  misc_feature: SGI Peptide ID NO. SG1METT47296
  misc_feature: SGI Peptide ID NO. AGRMET1T177567
  misc_feature (78)..(307): Pfam Id: PF03945 Pfam Desc: delta endotoxin, N-terminal domain
  misc_feature (515)..(655): Pfam Id: PF03944 Pfam Desc: delta endotoxin
  misc_feature (313)..(505): Pfam Id: PF00555 Pfam Desc: delta endotoxin
  misc_feature (1)..(680): NCBI GI: 228904964 Blast Desc: Pesticidal crystal protein cry10Aa [Bacillus thuringiensis IBL 4222] gi|228854675|gb|EEM99282.1| Pesticidal crystal protein cry10Aa [Bacillus thuringiensis IBL 4222]
  misc_feature (6)..(680): NCBI GI: 161598578 Blast Desc: pesticidial crystal protein cry10AA [Bacillus thuringiensis serovar israelensis] gi|21685444|emb|CAD30098.1| pesticidial crystal protein cry10AA [Bacillus thuringiensis
  misc_feature (6)..(680): NCBI GI: 117329 Blast Desc: C10AA_BACTI RecName: Full=Pesticidal crystal protein cry10Aa; AltName: Full=78 kDa crystal protein; AltName: Full=Crystaline entomocidal protoxin; AltName: Full=Insecticidal
  misc_feature (6)..(680): NCBI GI: 159141836 Blast Desc: Cry4c [Bacillus thuringiensis]
  misc_feature (6)..(680): NCBI GI: 159141832 Blast Desc: Cry4c [Bacillus thuringiensis]
  misc_feature (6)..(680): NCBI GI: 159141830 Blast Desc: Cry4c [Bacillus thuringiensis]
  misc_feature (6)..(680): NCBI GI: 159141838 Blast Desc: Cry4c [Bacillus thuringiensis]
  misc_feature (6)..(680): NCBI GI: 159141840 Blast Desc: Cry4c [Bacillus thuringiensis]
  misc_feature (6)..(680): NCBI GI: 159141834 Blast Desc: Cry4c [Bacillus thuringiensis]
  misc_feature (42)..(653): NCBI GI: 169261091 Blast Desc: insecticidal crystal protein Cry54Aa [Bacillus thuringiensis]
  misc_feature: Useful for conferring pesticidal activity to an organism
  misc_feature: Useful for controlling a pest organism
MGGIDMNPYQNKNEYEIFNAPSNGFSKSNNYSRYPLANKPNQPLKNTNYKDWLNVCQDNQQYGNNAGNFASSETIVGVSAGIIVVGTMLGAFAAPVLAAGIISFGTLLPIFWQGSDPANVWQDLLNIGGRPIQEIDKNIINVLTSIVTPIKNQLDKYQEFFDKWEPARTHANAKAVHDLFTTLEPIIDKDLDMLKNNASYRIPTLPAYAQIATWHLNLLKHAATYYNIWLQNQGINPSTFNSSNYYQGYLKRKIQEYTDYCIQTYNAGLTMIRTNTNATWNMYNTYRLEMTLTVLDLIAIFPNYDPEKYPIGVKSELIREVYTNVNSDTFRTITELENGLTRNPTLFTWINQGRFYTRNSRDILDPYDIFSFTGNQMAFTHTNDDRNIIWGAVHGNIISQDTSKVFPFYRNKPIDKVEIVRHREYSDIIYEMIFFSNSSEVFRYSSNSTIENNYKRTDSYMIPKQTWKNKEYGHTLSYIKTDNYIFSVVRERRRVAFSWTHTSVDFQNTIDLDNITQIHALKALKVSSDSKIVKGPGHTGGDLVILKDSMDFRVRFLKNVSRQYQVRIRYATNAPKTTVFLTGIDTISVELPSTTSRQNPNATDLTYADFGYVTFPRTVPNKTFEGEDTLLMTLYGTPNHSYNIYIDKIEFIPITQSVLDYTEKQNIEKTQKIVNDLFVN

SEQ ID NO: 77 - DNA, 2081 bp, Bacillus sp.
  misc_feature: SGI cDNA ID NO. SG1METG47286
  misc_feature: SGI cDNA ID NO. AGRMET1G148646
  misc_feature: Encodes the peptide sequence at SEQ ID NO 78
  misc_feature: Useful for conferring pesticidal activity to an organism
  misc_feature: Useful for controlling a pest organism
ttgttacaccagaaaaagattgtatccaatgtgaatatgggaggaataaatatgaattcaggctatccgttagcgaatgacttacaagggtcaatgaaaaacacgaactataaagattggctagccatgtgtgaaaataaccaacagtatggcgttaatccagctgcgattaattcttcttcagttagtaccgctttaaaagtagctggagctatccttaaatttgtaaacccacctgcaggtactgtcttaaccgtacttagcgcggtgcttcctattctttggccgactaatactccaacgcctgaaagagtttggaatgatttcatgaccaatacagggaatcttattgatcaaactgtaacagcttatgtacgaacagatgcaaatgcaaaaatgacggttgtgaaagattatttagatcaatatacaactaaatttaacacttggaaaagagagcctaataaccagtcctatagaacagcagtaataactcaatttaacttaaccagtgccaaacttcgagagaccgcagtttattttagcaacttagtaggttatgaattattgttattaccaatatacgcacaagtagcaaatttcaatttacttttaataagagatggcctcataaatgcacaagaatggtctttagcacgtagtgctggtgaccaactatataacactatggtgcagtacactaaagaatatattgcacatagcattacatggtataataaaggtttagatgtacttagaaataaatctaatggacaatggattacgtttaatgattataaaagagagatgactattcaagtattagatatactcgctctttttgccagttatgatccacgtcgataccctgcggacaaaatagataatacgaaactatcaaaaacagaatttacaagagagatttatacagctttagtagaatctccttctagtaaatctatagcagcactggaggcagcacttacacgagatgttcatttattcacttggctaaagagagtagatttctggaccaatactatatatcaagatttaagatttttatctgccaataaaattgggttttcatatacaaattcttctgcaatgcaagaaagtggaatttatggaagttctggttttggttcaaatcttactcatcaaattcaacttaattctaatgtttataaaacttctatcacagatactagctccccctctaatcgagttacaaaaatggatttctacaaaattgatggtactcttgcctcttataattcaaatataacaccaactcctgaaggtttaaggaccacattttttggattttcaacaaatgagaacacacctaatcaaccaactgtaaatgattatacgcatattttaagctatataaaaactgatgttatagattataacagtaacagggtttcatttgcttggacacataagattgttgaccctaataatcaaatatacacagatgctatcacacaagttccggccgtaaaatctaacttcttgaatgcaacagctaaagtaatcaagggacctggtcatacagggggggatctagttgctcttacaagcaatggtactctatcaggcagaatggagattcaatgtaaaacaagtatttttaatgatcctacaagaagttacggattacgcatacgttatgctgcaaatagtccaattgtattgaatgtatcatatgtattacaaggagtttctagaggaacaacgattagtacagaatctacgttttcaagacctaataatataatacctacagatttaaaatatgaagagtttagatacaaagatccttttgatgcaattgtaccgatgagattatcttctaatcaactgataactatagctattcaaccattaaacatgacttcaaataatcaagtgattattgacagaatcgaaattattccaatcactcaatctgtattagatgagacagagaaccaaaatttagaatcagaacgagaagttgtgaatgcactgtttacaaatgacgcgaaagatgcattaaacattggaacgacagattatgacatagatcaagc

SEQ ID NO: 78 - protein, 693 aa, Bacillus sp.
  misc_feature: SGI Peptide ID NO. SG1METT47286
  misc_feature: SGI Peptide ID NO. AGRMET1T148646
  misc_feature (62)..(287): Pfam Id: PF03945 Pfam Desc: delta endotoxin, N-terminal domain
  misc_feature (497)..(651): Pfam Id: PF03944 Pfam Desc: delta endotoxin
  misc_feature (301)..(487): Pfam Id: PF00555 Pfam Desc: delta endotoxin
  misc_feature (18)..(693): NCBI GI: 161598576 Blast Desc: pesticidial crystal protein cry4BA [Bacillus thuringiensis serovar israelensis] gi|8488969|sp|P05519.2|CR4BA_BACTI RecName: Full=Pesticidal kDa
  misc_feature (18)..(693): NCBI GI: 40310 Blast Desc: protein product [Bacillus thuringiensis]
  misc_feature (18)..(693): NCBI GI: 149211793 Blast Desc: pesticidal crystal protein [Bacillus thuringiensis]
  misc_feature (18)..(693): NCBI GI: 57639076 Blast Desc: delta-endotoxin [Bacillus thuringiensis serovar israelensis]
  misc_feature (18)..(693): NCBI GI: 149211795 Blast Desc: truncated pesticidal crystal protein [Bacillus thuringiensis]
  misc_feature (18)..(693): NCBI GI: 149211799 Blast Desc: pesticidal crystal protein [Bacillus thuringiensis]
  misc_feature (18)..(693): NCBI GI: 149211797 Blast Desc: pesticidal crystal protein [Bacillus thuringiensis]
  misc_feature (18)..(693): NCBI GI: 149211803 Blast Desc: pesticidal crystal protein [Bacillus thuringiensis]
  misc_feature (18)..(693): NCBI GI: 216288 Blast Desc: 130 kDa insecticidal protein (ISRH3) [Bacillus thuringiensis serovar israelensis] gi|225982|prf||1405201A insecticidal protein ISRH3
  misc_feature (18)..(693): NCBI GI: 149211801 Blast Desc: pesticidal crystal protein [Bacillus thuringiensis]
  misc_feature: Useful for conferring pesticidal activity to an organism
  misc_feature: Useful for controlling a pest organism
MLHQKKIVSNVNMGGINMNSGYPLANDLQGSMKNTNYKDWLAMCENNQQYGVNPAAINSSSVSTALKVAGAILKFVNPPAGTVLTVLSAVLPILWPTNTPTPERVWNDFMTNTGNLIDQTVTAYVRTDANAKMTVVKDYLDQYTTKFNTWKREPNNQSYRTAVITQFNLTSAKLRETAVYFSNLVGYELLLLPIYAQVANFNLLLIRDGLINAQEWSLARSAGDQLYNTMVQYTKEYIAHSITWYNKGLDVLRNKSNGQWITFNDYKREMTIQVLDILALFASYDPRRYPADKIDNTKLSKTEFTREIYTALVESPSSKSIAALEAALTRDVHLFTWLKRVDFWTNTIYQDLRFLSANKIGFSYTNSSAMQESGIYGSSGFGSNLTHQIQLNSNVYKTSITDTSSPSNRVTKMDFYKIDGTLASYNSNITPTPEGLRTTFFGFSTNENTPNQPTVNDYTHILSYIKTDVIDYNSNRVSFAWTHKIVDPNNQIYTDAITQVPAVKSNFLNATAKVIKGPGHTGGDLVALTSNGTLSGRMEIQCKTSIFNDPTRSYGLRIRYAANSPIVLNVSYVLQGVSRGTTISTESTFSRPNNIIPTDLKYEEFRYKDPFDAIVPMRLSSNQLITIAIQPLNMTSNNQVIIDRIEIIPITQSVLDETENQNLESEREVVNALFTNDAKDALNIGTTDYDIDQ

SEQ ID NO: 79 - DNA, 792 bp, Bacillus sp.
  misc_feature: SGI cDNA ID NO. SG1METG47287
  misc_feature: SGI cDNA ID NO. AGRMET1G218700
  misc_feature: Encodes the peptide sequence at SEQ ID NO 80
  misc_feature: Useful for conferring pesticidal activity to an organism
  misc_feature: Useful for controlling a pest organism
atgcaccttaataatttgaataattttaataatttagaaaacaatggtgaatatcactgttcaggacctattattaaaaaaccgtttaggcatattgcattaacagttccatccagtgatataactaattttaatgaaattttttatgtagagccacaatacattgctcaagcaattcgtttaacaaatacatttcaaggagctatagatccacttaccttaaatttcaattttgaaaaagctttacaaattgcaaatggtcttcctaatgcaggagttacaggaactattaatcaaagtgtaattcatcaaacaattgaagtttcagttatgattagtcaaattaaagaaattattagaagtgtgctagggctcgttatcaatagtgctaatttttggaacagcgtagtatctgctattacaaatacatttacaaatttagaacctcaagtagatgaaaattggattgtttggcgtaatttatcagctactcaaacaagttatttttataaaattttattttctattcaaaatgaagatacaggtagatttatggcaatattgcctatagcatttgaaattactgtggatgttcaaaaacaacaattattattcattacaataaaagatagtgcacgatatgaagttaaaatgaaagctcttactgtagttcaagctttagattcttataatgcacccattatagatgtatttaatgttcgtaactatagcttacatcgtccaaatcataatattcttcaaaatctgaatgttaatccaataaaatcgtaa

SEQ ID NO: 80 - protein, 263 aa, Bacillus sp.
  misc_feature: SGI Peptide ID NO. SG1METT47287
  misc_feature: SGI Peptide ID NO. AGRMET1T218700
  misc_feature (26)..(244): Pfam Id: PF01338 Pfam Desc: Bacillus thuringiensis toxin
  misc_feature (1)..(263): NCBI GI: 161598575 Blast Desc: type-2BAa cytolytic delta-endotoxin [Bacillus thuringiensis serovar israelensis] gi|228905722|ref|ZP_04069644.1| Type-2Ba cytolytic [Bacillus IBL
  misc_feature (1)..(263): NCBI GI: 7141139 Blast Desc: AF215646_1 cytolytic toxin Cyt2Ba8 [Bacillus thuringiensis]
  misc_feature (1)..(252): NCBI GI: 209168619 Blast Desc: Cyt2Ba [Bacillus thuringiensis serovar israelensis]
  misc_feature (18)..(263): NCBI GI: 209168617 Blast Desc: Cyt2Ba [Bacillus thuringiensis]
  misc_feature (6)..(263): NCBI GI: 17977983 Blast Desc: Cyt2Bc protein [Bacillus thuringiensis serovar medellin]
  misc_feature (8)..(263): NCBI GI: 8469212 Blast Desc: CT2BB_BACTJ RecName: Full=Type-2Bb cytolytic delta-endotoxin; AltName: Full=30 kDa cytolytic toxin gi|2228582|gb|AAB93477.1| cytolytic toxin [Bacillus
  misc_feature (35)..(238): NCBI GI: 194319966 Blast Desc: CT2BB_BACTJ RecName: Full=Type-2Bb cytolytic delta-endotoxin; AltName: Full=30 kDa cytolytic toxin gi|2228582|gb|AAB93477.1| cytolytic toxin [Bacillus
  misc_feature (1)..(258): NCBI GI: 3023612 Blast Desc: CT2AA_BACTY RecName: Full=Type-2Aa cytolytic delta-endotoxin; AltName: Full=29 kDa cytolytic toxin gi|157830540|pdb|1CBY|A Chain A, Delta-Endotoxin cytolytic CytB
  misc_feature (1)..(259): NCBI GI: 194241588 Blast Desc: Cyt2Aa [Bacillus thuringiensis]
  misc_feature (63)..(219): NCBI GI: 2636733 Blast Desc: cytolytic toxin [Bacillus thuringiensis] gi|2766495|gb|AAB95384.1| cytolytic toxin [Bacillus thuringiensis serovar tenebrionis]
  misc_feature: Useful for conferring pesticidal activity to an organism
  misc_feature: Useful for controlling a pest organism
MHLNNLNNFNNLENNGEYHCSGPIIKKPFRHIALTVPSSDITNFNEIFYVEPQYIAQAIRLTNTFQGAIDPLTLNFNFEKALQIANGLPNAGVTGTINQSVIHQTIEVSVMISQIKEIIRSVLGLVINSANFWNSVVSAITNTFTNLEPQVDENWIVWRNLSATQTSYFYKILFSIQNEDTGRFMAILPIAFEITVDVQKQQLLFITIKDSARYEVKMKALTVVQALDSYNAPIIDVFNVRNYSLHRPNHNILQNLNVNPIKS

SEQ ID NO: 81 - DNA, 750 bp, Bacillus sp.
  misc_feature: SGI cDNA ID NO. SG1METG47231
  misc_feature: SGI cDNA ID NO. AGRMET1G218928
  misc_feature: Encodes the peptide sequence at SEQ ID NO 82
  misc_feature: Useful for conferring pesticidal activity to an organism
  misc_feature: Useful for controlling a pest organism
atggaaaatttaaatcattgtccattagaagatataaaggtaaatccatggaaaacccctcaatcaacagcaagggttattacattacgtgttgaggatccaaatgaaatcaataatcttctttctattaacgaaattgataatccgaattatatattgcaagcaattatgttagcaaatgcatttcaaaatgcattagttcccacttctacagattttggtgatgccctacgctttagtatgccaaaaggtttagaaatcgcaaacacaattacaccgatgggtgctgtagtgagttatgttgatcaaaatgtaactcaaacgaataaccaagtaagtgttatgattaataaagtcttagaagtgttaaaaactgtattaggagttgcattaagtggatctgtaatagatcaattaactgcagcagttacaaatacgtttacaaatttaaatactcaaaaaaatgaagcatggattttctggggcaaggaaactgctaatcaaacaaattacacatacaatgtcctgtttgcaatccaaaatgcccaaactggtggcgttatgtattgtgtaccagttggttttgaaattaaagtatcagcagtaaaggaacaagttttatttttcacaattcaagattctgcgagctacaatgttaacatccaatctttgaaatttgcacaaccattagttagctcaagtcagtatccaattgcagatcttactagcgctattaatggaaccctctaa

SEQ ID NO: 82 - protein, 249 aa, Bacillus sp.
  misc_feature: SGI Peptide ID NO. SG1METT47231
  misc_feature: SGI Peptide ID NO. AGRMET1T218928
  misc_feature (19)..(248): Pfam Id: PF01338 Pfam Desc: Bacillus thuringiensis toxin
  misc_feature (1)..(249): NCBI GI: 161598560 Blast Desc: type-1AA cytolytic delta-endotoxin [Bacillus thuringiensis serovar israelensis] gi|228905287|ref|ZP_04069272.1| Type-1Ba cytolytic [Bacillus IBL
  misc_feature (1)..(249): NCBI GI: 112007103 Blast Desc: cytolytic toxin Cyt1 [Bacillus thuringiensis]
  misc_feature (1)..(249): NCBI GI: 61252393 Blast Desc: CT1AA_BACTM RecName: Full=Type-1Aa cytolytic delta-endotoxin; AltName: Full=27 kDa cytolytic toxin gi|40261|emb|CAA68329.1| protein product [Bacillus thuringiensis]
  misc_feature (1)..(249): NCBI GI: 157092588 Blast Desc: Cyt1A97 [Bacillus thuringiensis serovar israelensis]
  misc_feature (1)..(249): NCBI GI: 3023611 Blast Desc: CT1AB_BACTV RecName: Full=Type-1Ab cytolytic delta-endotoxin; AltName: Full=27 kDa cytolytic toxin gi|1765904|emb|CAA67328.1| cytolytic and mosquitocidal toxin
  misc_feature (6)..(248): NCBI GI: 3023618 Blast Desc: CT1BA_BACTW RecName: Full=Type-1Ba cytolytic delta-endotoxin gi|1408457|gb|AAB03693.1| delta endotoxin [Bacillus thuringiensis]
  misc_feature (39)..(192): NCBI GI: 152013901 Blast Desc: dipterans toxic crystal protein-like protein [Bacillus thuringiensis]
  misc_feature (37)..(187): NCBI GI: 152013895 Blast Desc: dipterans toxic crystal protein-like protein [Bacillus thuringiensis]
  misc_feature (39)..(187): NCBI GI: 152013893 Blast Desc: dipterans toxic crystal protein-like protein [Bacillus thuringiensis] gi|152013899|gb|ABS20056.1| dipterans toxic crystal protein-like protein [Bacillus thuringiensis]
  misc_feature (40)..(187): NCBI GI: 152013897 Blast Desc: dipterans toxic crystal protein-like protein [Bacillus thuringiensis]
  misc_feature: Useful for conferring pesticidal activity to an organism
  misc_feature: Useful for controlling a pest organism
MENLNHCPLEDIKVNPWKTPQSTARVITLRVEDPNEINNLLSINEIDNPNYILQAIMLANAFQNALVPTSTDFGDALRFSMPKGLEIANTITPMGAVVSYVDQNVTQTNNQVSVMINKVLEVLKTVLGVALSGSVIDQLTAAVTNTFTNLNTQKNEAWIFWGKETANQTNYTYNVLFAIQNAQTGGVMYCVPVGFEIKVSAVKEQVLFFTIQDSASYNVNIQSLKFAQPLVSSSQYPIADLTSAINGTL

SEQ ID NO: 83 - DNA, 960 bp, Bacillus sp.
  misc_feature: SGI cDNA ID NO. SG1METG47319
  misc_feature: SGI cDNA ID NO. AGRMET1G174557
  misc_feature: Encodes the peptide sequence at SEQ ID NO 84
  misc_feature: Useful for conferring pesticidal activity to an organism
  misc_feature: Useful for controlling a pest organism
atgacaattacaaatatcgaattagctatacgagattatacaaattgggatggtactcgtgaaattccgggatacatcaatcgtcaggttatagatgggccaaatatatatgactatgtaattagtgactctgtagctgttccaaaaactgtaattttcaatgtaaatccaactccatataccgggcctaatataatatcagaaaataatacagatgtaaatcaaaataaacgtattaagttttctgaaaaagtagttgaaactactacacatactactacaaagggttttaaaattggcggtggaattaaatctactacaaaaggaactttaaaattaaaatttcctgtaggagaactagggtttgagcaaactcttgagctacctcttacaggagaatacaatagtagttccactacggggaacacttgtgcaaatgaaaaattatgggaaataacagataatataactgtacctccacattcacgtgtaacttcaactttaataattatgaaaacggaagtaagggttccaatggaattaaccactaatcttagaggaactaattctagtggtgaaggctcgttccctactagtaatggtcttttttcatatactacttcagctcgtggaactgtaggcggtatttttgttagttattacgtgaggcctgcttctgcattgtataatacctcttggcctgataaacctgcaacttttaattctattggctcaaatgaatctctaaatttattgggatctggatattctgacgtagttccatctctatatgttactattagacaagatcaaactccattatcaggatatccaggtgaaacgaaaacctggtattcagataaagtgatattaagagatggaagaattgtaacactaccaagcaatgctgatgtaaatatgtcacaaacagccaaaattccatattgtgatagatcttaa

SEQ ID NO: 84 - protein, 319 aa, Bacillus sp.
  misc_feature: SGI Peptide ID NO. SG1METT47319
  misc_feature: SGI Peptide ID NO. AGRMET1T174557
  misc_feature (45)..(283): Pfam Id: PF03318 Pfam Desc: Clostridium epsilon toxin ETX/Bacillus mosquitocidal toxin MTX2
  misc_feature (1)..(319): NCBI GI: 75758299 Blast Desc: Pesticidial crystal protein cry15Aa [Bacillus thuringiensis serovar israelensis ATCC 35646] gi|228904971|ref|ZP_04069020.1| Pesticidial crystal protein IBL
  misc_feature (1)..(319): NCBI GI: 292398077 Blast Desc: crystal protein [Bacillus thuringiensis serovar malayensis]
  misc_feature (1)..(305): NCBI GI: 75758300 Blast Desc: Pesticidial crystal protein cry15Aa [Bacillus thuringiensis serovar israelensis ATCC 35646] gi|228904970|ref|ZP_04069019.1| Pesticidial crystal protein IBL
  misc_feature (1)..(305): NCBI GI: 255653180 Blast Desc: Cry [Bacillus thuringiensis serovar jegathesan]
  misc_feature (1)..(300): NCBI GI: 294661779 Blast Desc: crystal protein [Bacillus thuringiensis]
  misc_feature (69)..(299): NCBI GI: 112253719 Blast Desc: Cry51Aa1 [Bacillus thuringiensis F14-1]
  misc_feature (1)..(286): NCBI GI: 16588691 Blast Desc: AF316145_2 crystal protein NT40KD [Bacillus thuringiensis serovar dakota]
  misc_feature (27)..(298): NCBI GI: 8928022 Blast Desc: C15AA_BACUT RecName: Full=Pesticidal crystal protein cry15Aa; AltName: Full=38 kDa crystal protein; AltName: Full=Crystaline entomocidal protoxin; AltName: Full=Insecticidal
  misc_feature (70)..(187): NCBI GI: 228918255 Blast Desc: bthur0012_54310 [Bacillus thuringiensis serovar pulsiensis BGSC 4CC1] gi|228841406|gb|EEM86552.1| bthur0012_54310 [Bacillus thuringiensis serovar pulsiensis BGSC 4CC1]
  misc_feature: Useful for conferring pesticidal activity to an organism
  misc_feature: Useful for controlling a pest organism
MTITNIELAIRDYTNWDGTREIPGYINRQVIDGPNIYDYVISDSVAVPKTVIFNVNPTPYTGPNIISENNTDVNQNKRIKFSEKVVETTTHTTTKGFKIGGGIKSTTKGTLKLKFPVGELGFEQTLELPLTGEYNSSSTTGNTCANEKLWEITDNITVPPHSRVTSTLIIMKTEVRVPMELTTNLRGTNSSGEGSFPTSNGLFSYTTSARGTVGGIFVSYYVRPASALYNTSWPDKPATFNSIGSNESLNLLGSGYSDVVPSLYVTIRQDQTPLSGYPGETKTWYSDKVILRDGRIVTLPSNADVNMSQTAKIPYCDRS

SEQ ID NO: 85 - DNA, 912 bp, Bacillus sp.
  misc_feature: SGI cDNA ID NO. SG1METG47320
  misc_feature: SGI cDNA ID NO. AGRMET1G174558
  misc_feature: Encodes the peptide sequence at SEQ ID NO 86
  misc_feature: Useful for conferring pesticidal activity to an organism
  misc_feature: Useful for controlling a pest organism
atggaaattacagatattgtattaaaaatatatgattttatcgagtgggattacgtaactaatcaagatggaataccttatactctttttgataaagccatctatgaatatgaacttaatgatacggttactattccagaaactaaagtttttcaaactactccgattccaattgcttccgccctaactataactgaaaataggtcatcacaaacacagcttcacactataaaattttccgaaaaaaaaatggaatcggtcaccaacactactgttcatggttttaaaattggtggtgcaattaaagttggtgcaaaaggtacagtaactgcaaattttttagtatcaggcggaacagcggaagcgaatgttgaactttctttaacaggagaatataattatagttcgactacagcaaatgtcaatcaaacagaaaaaacatgggaaataacagaaaacgtaagtgttgcctcacatactagtttaacgagccaacttataattatgcaagcagacatcagagttcctatgatattaaactctaatcttataggaaagcgatattatgatgactatgccaatatgtttttttcgtatattttccaaagtaaaacaagcggtcgaacagaaatgatttctccagctagtagattagctaatcaatcatggcctggaaaacctatagtttttaaatctggaggttcaaatggatctctgaatttaagtggattcggatattctgatttatataaaggtctatatgcatttattagatacactgaaaccccattagatagatattcatcacctggtaaaacatgggattcgaatttgatacatttaagagatggacagattttgaatgtatatgataatagaggtattgtaaaacctgtgaggctagttgagtaa

SEQ ID NO: 86 - protein, 303 aa, Bacillus sp.
  misc_feature: SGI Peptide ID NO. SG1METT47320
  misc_feature: SGI Peptide ID NO. AGRMET1T174558
  misc_feature (40)..(272): Pfam Id: PF03318 Pfam Desc: Clostridium epsilon toxin ETX/Bacillus mosquitocidal toxin MTX2
  misc_feature (1)..(303): NCBI GI: 75758300 Blast Desc: Pesticidial crystal protein cry15Aa [Bacillus thuringiensis serovar israelensis ATCC 35646] gi|228904970|ref|ZP_04069019.1| Pesticidial crystal protein IBL
  misc_feature (1)..(303): NCBI GI: 255653180 Blast Desc: Cry [Bacillus thuringiensis serovar jegathesan]
  misc_feature (1)..(295): NCBI GI: 75758299 Blast Desc: Pesticidial crystal protein cry15Aa [Bacillus thuringiensis serovar israelensis ATCC 35646] gi|228904971|ref|ZP_04069020.1| Pesticidial crystal protein IBL
  misc_feature (1)..(295): NCBI GI: 292398077 Blast Desc: crystal protein [Bacillus thuringiensis serovar malayensis]
  misc_feature (1)..(287): NCBI GI: 294661779 Blast Desc: crystal protein [Bacillus thuringiensis]
  misc_feature (1)..(277): NCBI GI: 16588691 Blast Desc: AF316145_2 crystal protein NT40KD [Bacillus thuringiensis serovar dakota]
  misc_feature (67)..(274): NCBI GI: 8928022 Blast Desc: C15AA_BACUT RecName: Full=Pesticidal crystal protein cry15Aa; AltName: Full=38 kDa crystal protein; AltName: Full=Crystaline entomocidal protoxin; AltName: Full=Insecticidal
  misc_feature (43)..(289): NCBI GI: 112253719 Blast Desc: Cry51Aa1 [Bacillus thuringiensis F14-1]
  misc_feature: Useful for conferring pesticidal activity to an organism
  misc_feature: Useful for controlling a pest organism
MEITDIVLKIYDFIEWDYVTNQDGIPYTLFDKAIYEYELNDTVTIPETKVFQTTPIPIASALTITENRSSQTQLHTIKFSEKKMESVTNTTVHGFKIGGAIKVGAKGTVTANFLVSGGTAEANVELSLTGEYNYSSTTANVNQTEKTWEITENVSVASHTSLTSQLIIMQADIRVPMILNSNLIGKRYYDDYANMFFSYIFQSKTSGRTEMISPASRLANQSWPGKPIVFKSGGSNGSLNLSGFGYSDLYKGLYAFIRYTETPLDRYSSPGKTWDSNLIHLRDGQILNVYDNRGIVKPVRLVE

SEQ ID NO: 87 - DNA, 291 bp, Bacillus sp.
  misc_feature: SGI cDNA ID NO. AGRMET1G167125
  misc_feature: Encodes the peptide sequence at SEQ ID NO. 88
  misc_feature: Useful for conferring pesticidal activity to an organism
  misc_feature: Useful for controlling a pest organism
atgaaatgctgttcatatgtaagacatggatctattggtgatgacatgataaaacatttaatggcaatatgggatcacgagataaagaatccatattcaaataggatggagtactctagatatatactcactacagaatattctgtgcaaaggaaaaatggtacaatcgtaaatcctccatggacgatgactgataagacaagcgcacattcagttacttatccaaatgctgaagaaaaagcattgaatgaaaacacaaaacaactatcaaaagctgaaagtgtgaactaa

SEQ ID NO: 88 - protein, 96 aa, Bacillus sp.
  misc_feature: SGI Peptide ID NO. AGRMET1T167125
  misc_feature (26)..(76): Pfam Id: PF05431 Pfam Desc: Insecticidal Crystal Toxin, P42
  misc_feature (26)..(95): NCBI GI: 229170564 Blast Desc: 41.9 kDa insecticidal toxin [Bacillus cereus AH621] gi|228612913|gb|EEK70090.1| 41.9 kDa insecticidal toxin [Bacillus cereus AH621]
  misc_feature: Useful for conferring pesticidal activity to an organism
  misc_feature: Useful for controlling a pest organism
MKCCSYVRHGSIGDDMIKHLMAIWDHEIKNPYSNRMEYSRYILTTEYSVQRKNGTIVNPPWTMTDKTSAHSVTYPNAEEKALNENTKQLSKAESVN

SEQ ID NO: 89 - DNA, 986 bp, Bacillus sp.
  misc_feature: SGI cDNA ID NO. AGRMET1G140198
  misc_feature: Encodes the peptide sequence at SEQ ID NO. 90
  misc_feature: Useful for conferring pesticidal activity to an organism
  misc_feature: Useful for controlling a pest organism
attgcaatgaaagttatacaaaaagatgcaaataatttaattaataaatattctagttatttattagctacatataaaaaaggcctaaaagaagcatccgaaaaaaaacttgaaaataatgattttccaacaactaataaccaacatcattatattaatacagtcagatggaatgtgatcaatcaatataaaagagggatgactttaactgtctttgattttgcttacaaatggaagtattaccaagaagtttatcaaaacaatataacgttaaatccagttcgaacaatttattcagatattgcaggttcagtatatccttatgaaaaaactacacatgaaattgataatattatcaagaatcagaaccttaaatatcgtggaatcttaaaagaaatgctaatttatcatgcacatagaatcgatagtgttcaaagtaagtatataaggaacaatgaaataattgataataaaaaaactgggggggctggtggaagggcaaccttttacgattttaaatatccaataaataaccctttaatacaagtagatatgaggtatgaattagtaccattttctttaggattcaaattatataatggagaaaagctaaaatctatatcgggtgctggactccctggaaaacataaggctggcgtttatcattatgtaggaaataaagtgtcttctattataggatttggtaaaaatgaaaccggtggattcaactcactagatgcaatggtagttggttttaaacgagacgattatatacctgaaaatagttttgttggtataaacaaaaatggtaaacctgtaactaaagtagtagatgcagtgaatttctacaaagagaagtttcaatccaatataataatgattgatgaacctatgtttggagatggggttttacaattcgaaaattattctaataatcttaataaggatagttatgtaacatatcaaattgatgcaaagatagaggg

SEQ ID NO: 90 - protein, 328 aa, Bacillus sp.
  misc_feature: SGI Peptide ID NO. AGRMET1T140198
  misc_feature (6)..(82): Pfam Id: PF03945 Pfam Desc: delta endotoxin, N-terminal domain
  misc_feature (13)..(252): NCBI GI: 229065811 Blast Desc: 83-kDa crystal protein [Bacillus cereus AH603] gi|228715456|gb|EEL67276.1| 83-kDa crystal protein [Bacillus cereus AH603]
  misc_feature (55)..(306): NCBI GI: 281202684 Blast Desc: PPL_09638 [Polysphondylium pallidum PN500]
  misc_feature: Useful for conferring pesticidal activity to an organism
  misc_feature: Useful for controlling a pest organism
IAMKVIQKDANNLINKYSSYLLATYKKGLKEASEKKLENNDFPTTNNQHHYINTVRWNVINQYKRGMTLTVFDFAYKWKYYQEVYQNNITLNPVRTIYSDIAGSVYPYEKTTHEIDNIIKNQNLKYRGILKEMLIYHAHRIDSVQSKYIRNNEIIDNKKTGGAGGRATFYDFKYPINNPLIQVDMRYELVPFSLGFKLYNGEKLKSISGAGLPGKHKAGVYHYVGNKVSSIIGFGKNETGGFNSLDAMVVGFKRDDYIPENSFVGINKNGKPVTKVVDAVNFYKEKFQSNIIMIDEPMFGDGVLQFENYSNNLNKDSYVTYQIDAKIE

SEQ ID NO: 91 - DNA, 363 bp, Bacillus sp.; identical to SEQ ID NO: 7
  misc_feature: SGI cDNA ID NO. AGRMET1G166163
  misc_feature: Encodes the peptide sequence at SEQ ID NO. 92
  misc_feature: Useful for conferring pesticidal activity to an organism
  misc_feature: Useful for controlling a pest organism

SEQ ID NO: 92 - protein, 120 aa, Bacillus sp.; identical to SEQ ID NO: 8
  misc_feature: SGI Peptide ID NO. AGRMET1T166163
  misc_feature (10)..(110): Pfam Id: PF03945 Pfam Desc: delta endotoxin, N-terminal domain
  misc_feature (17)..(106): NCBI GI: 8469161 Blast Desc: CR3CA_BACTK RecName: Full=Pesticidal crystal protein cry3Ca; AltName: Full=73 kDa crystal protein; AltName: Full=Crystaline entomocidal protoxin; AltName: Full=Insecticidal
  misc_feature (17)..(106): NCBI GI: 117324 Blast Desc: CR3BA_BACTO RecName: Full=Pesticidal crystal protein cry3Ba; AltName: Full=75 kDa crystal protein; AltName: Full=Crystaline entomocidal protoxin; AltName: Full=Insecticidal
  misc_feature (9)..(111): NCBI GI: 41688283 Blast Desc: mosquitocidal toxin [Bacillus thuringiensis serovar entomocidus]
  misc_feature (53)..(110): NCBI GI: 228911584 Blast Desc: Pesticidal crystal protein cry1Bc [Bacillus thuringiensis IBL 200] gi|8927997|sp|Q9XDL1.1|CR1ID_BACTU RecName: Full=Pesticidal crystal protein cry1Id; AltName: Full=81
  misc_feature (17)..(117): NCBI GI: 15988322 Blast Desc: Pesticidal crystal protein cry1Bc [Bacillus thuringiensis IBL 200] gi|8927997|sp|Q9XDL1.1|CR1ID_BACTU RecName: Full=Pesticidal crystal protein cry1Id; AltName: Full=81
  misc_feature (17)..(117): NCBI GI: 940200 Blast Desc: Cry3Bb2 [Bacillus thuringiensis]
  misc_feature (17)..(117): NCBI GI: 8469155 Blast Desc: CR3BB_BACTU RecName: Full=Pesticidal crystal protein cry3Bb; AltName: Full=74 kDa crystal protein; AltName: Full=Crystaline entomocidal protoxin; AltName: Full=Insecticidal
  misc_feature (17)..(110): NCBI GI: 33325407 Blast Desc: Cry1Ia [Bacillus thuringiensis]
  misc_feature (17)..(110): NCBI GI: 294987182 Blast Desc: Cry1I toxin crystal protein [Bacillus thuringiensis]
  misc_feature (17)..(110): NCBI GI: 33326396 Blast Desc: Cry1Ia [Bacillus thuringiensis]
  misc_feature: Useful for conferring pesticidal activity to an organism
  misc_feature: Useful for controlling a pest organism

SEQ ID NO: 93 - DNA, 657 bp, Bacillus sp.
  misc_feature: SGI cDNA ID NO. AGRMET1G218423
  misc_feature: Encodes the peptide sequence at SEQ ID NO. 94
  misc_feature: Useful for conferring pesticidal activity to an organism
  misc_feature: Useful for controlling a pest organism
gtgaatgatatgttttataatcgagtgattaccatggctttaccttctctgaatgctatttcatatttagaggtgtaccaattagaccaaagatatttagataaggttttaaatttatcacaggaatttcaaaaatctttaaatattgaggattttagcttcgattttcaaaaagctatcgagattacagatttttacgacaatacttttgtaacaaatagtataaaacatactataaaaaaagaaggggttagtgttggcaaaatgattgagactatctatttcgctgttaacaacctcctagaattatcagaacataataatatttttcgttctagggtgttaaatactataactaacgcttttttaaacctttcacatcaagaaaatgaatcttactttttctattatcaaaaagataataatcaaactagttatcgttaccatatttttttagcaattcaggaaaataacgaaaatcttttcttgaaaatagttccaatttcaattgatgtaacaataaattccaatattgaggaaataagaattttaaacagccatgacattagagattttactgttaatataaaggcaataaacttagtgttttatgatatagacaatccaaatttattaaaagattttaatagaagttaa

SEQ ID NO: 94 - protein, 218 aa, Bacillus sp.
  misc_feature: SGI Peptide ID NO. AGRMET1T218423
  misc_feature (7)..(202): Pfam Id: PF01338 Pfam Desc: Bacillus thuringiensis toxin
  misc_feature (4)..(218): NCBI GI: 228925032 Blast Desc: Insecticidal crystal protein CryET29 [Bacillus thuringiensis serovar huazhongensis BGSC 4BD1] gi|228834609|gb|EEM80119.1| Insecticidal crystal protein CryET29
  misc_feature (4)..(202): NCBI GI: 14017442 Blast Desc: insecticidal crystal protein CryET29 [Bacillus thuringiensis]
  misc_feature (8)..(202): NCBI GI: 8469212 Blast Desc: CT2BB_BACTJ RecName: Full=Type-2Bb cytolytic delta-endotoxin; AltName: Full=30 kDa cytolytic toxin gi|2228582|gb|AAB93477.1| cytolytic toxin [Bacillus
  misc_feature (8)..(202): NCBI GI: 209168617 Blast Desc: Cyt2Ba [Bacillus thuringiensis]
  misc_feature (8)..(202): NCBI GI: 342360662 Blast Desc: toxin [Bacillus thuringiensis]
  misc_feature (8)..(202): NCBI GI: 161598575 Blast Desc: type-2BAa cytolytic delta-endotoxin [Bacillus thuringiensis serovar israelensis] gi|228905722|ref|ZP_04069644.1| Type-2Ba cytolytic [Bacillus IBL
  misc_feature (8)..(202): NCBI GI: 209168619 Blast Desc: Cyt2Ba [Bacillus thuringiensis serovar israelensis]
  misc_feature (8)..(202): NCBI GI: 7141139 Blast Desc: AF215646_1 cytolytic toxin Cyt2Ba8 [Bacillus thuringiensis]
  misc_feature (8)..(202): NCBI GI: 17977983 Blast Desc: Cyt2Bc protein [Bacillus thuringiensis serovar medellin]
  misc_feature (14)..(202): NCBI GI: 194319966 Blast Desc: Cyt2Bc protein [Bacillus thuringiensis serovar medellin]
  misc_feature: Useful for conferring pesticidal activity to an organism
  misc_feature: Useful for controlling a pest organism
MNDMFYNRVITMALPSLNAISYLEVYQLDQRYLDKVLNLSQEFQKSLNIEDFSFDFQKAIEITDFYDNTFVTNSIKHTIKKEGVSVGKMIETIYFAVNNLLELSEHNNIFRSRVLNTITNAFLNLSHQENESYFFYYQKDNNQTSYRYHIFLAIQENNENLFLKIVPISIDVTINSNIEEIRILNSHDIRDFTVNIKAINLVFYDIDNPNLLKDFNRS

SEQ ID NO: 95 - DNA, 657 bp, Bacillus sp.
  misc_feature: SGI cDNA ID NO. AGRMET1G218946
  misc_feature: Encodes the peptide sequence at SEQ ID NO. 96
  misc_feature: Useful for conferring pesticidal activity to an organism
  misc_feature: Useful for controlling a pest organism
gtgaatgatatgttttataatcgagtgattaccatggctttaccttctctgaatgctatttcatatttagaggtgtaccaattagaccaaaaatatttagataaggttttaactttatcacaggaatttcaaaaatctctaaatattgaggattttagctttgattttcaaaaagctatcgagattacagattattacgacaatacttttgtaacaaatagtataaatcatactataaaaaaagaaggggttagtgttggtaaaatgattgacactatctatttcactattaacaacctccttgaattatcagaacataataatatttttcgttctagggtgttaaatactataactaacgcttttttaaacctttcacatcaagaaaaagaatcttactttttctattatcaaaaagataacaatcaaactagttatcgttaccatatttttttagcaattcaggaaaataacgaaaatcttttcttgaaaatagttccaatttcaattgatgtaacaataaattccaatattgaggaaataagaattttaaacacccatgacattagagattttactgttaatataaaagcaataaacttggtgttttatgatatagataatccaaatttattaaaagattttaatagaagttaa

SEQ ID NO: 96 - protein, 218 aa, Bacillus sp.
  misc_feature: SGI Peptide ID NO. AGRMET1T218946
  misc_feature (7)..(202): Pfam Id: PF01338 Pfam Desc: Bacillus thuringiensis toxin
  misc_feature (4)..(218): NCBI GI: 228925032 Blast Desc: Insecticidal crystal protein CryET29 [Bacillus thuringiensis serovar huazhongensis BGSC 4BD1] gi|228834609|gb|EEM80119.1| Insecticidal crystal protein CryET29
  misc_feature (4)..(202): NCBI GI: 14017442 Blast Desc: insecticidal crystal protein CryET29 [Bacillus thuringiensis]
  misc_feature (8)..(202): NCBI GI: 8469212 Blast Desc: CT2BB_BACTJ RecName: Full=Type-2Bb cytolytic delta-endotoxin; AltName: Full=30 kDa cytolytic toxin gi|2228582|gb|AAB93477.1| cytolytic toxin [Bacillus
  misc_feature (8)..(202): NCBI GI: 209168619 Blast Desc: Cyt2Ba [Bacillus thuringiensis serovar israelensis]
  misc_feature (8)..(202): NCBI GI: 209168617 Blast Desc: Cyt2Ba [Bacillus thuringiensis]
  misc_feature (8)..(202): NCBI GI: 342360662 Blast Desc: toxin [Bacillus thuringiensis]
  misc_feature (8)..(202): NCBI GI: 161598575 Blast Desc: type-2BAa cytolytic delta-endotoxin [Bacillus thuringiensis serovar israelensis] gi|228905722|ref|ZP_04069644.1| Type-2Ba cytolytic [Bacillus IBL
  misc_feature (8)..(202): NCBI GI: 17977983 Blast Desc: Cyt2Bc protein [Bacillus thuringiensis serovar medellin]
  misc_feature (14)..(202): NCBI GI: 194319966 Blast Desc: Cyt2Bc protein [Bacillus thuringiensis serovar medellin]
  misc_feature (8)..(202): NCBI GI: 7141139 Blast Desc: AF215646_1 cytolytic toxin Cyt2Ba8 [Bacillus thuringiensis]
  misc_feature: Useful for conferring pesticidal activity to an organism
  misc_feature: Useful for controlling a pest organism
MNDMFYNRVITMALPSLNAISYLEVYQLDQKYLDKVLTLSQEFQKSLNIEDFSFDFQKAIEITDYYDNTFVTNSINHTIKKEGVSVGKMIDTIYFTINNLLELSEHNNIFRSRVLNTITNAFLNLSHQEKESYFFYYQKDNNQTSYRYHIFLAIQENNENLFLKIVPISIDVTINSNIEEIRILNTHDIRDFTVNIKAINLVFYDIDNPNLLKDFNRS

SEQ ID NO: 97 - DNA, 651 bp, Bacillus sp.
  misc_feature: SGI cDNA ID NO. AGRMET1G218535
  misc_feature: Encodes the peptide sequence at SEQ ID NO. 98
  misc_feature: Useful for conferring pesticidal activity to an organism
  misc_feature: Useful for controlling a pest organism
atgtataataaaagaattattaatttggaaattccctcgtataatgctataaatttcttagaaatatacagattaccacaagttcatttgaatcaggctcttaatataactcaacatctacaaaagtccttaagcctgcaaacgcttaatcttgagtttgaccaattaaatgatttaatcagtgagattccgggaggaagtattttaaatacaattgaccaaagggtagaatatagtgagattaatactacctgtgcaataaataatatcgtggatatcgttaaaagtaattgtgagatgtttgaagatgattttttactacaatctaagctagaaagtgtaatttcaaatgtatttttaaatcttgctaatcaagaaaaaaattcttatgtattttatcatgaaaaattatctcataaaactagttatagttatcatgttatttttgtaatagataacatggagtccagtttaaatgtttttccaatttcatttaatattaatgtggattccagttatgaaaatctaaacaaaaactcaattagtgatcttcaatcttataaaattaaaattagtggaataaattttgccataagtaaaaacaatgaattagcagaaataatggaaagagtaacggaaagtaccttatag

SEQ ID NO: 98 - protein, 216 aa, Bacillus sp.
  misc_feature: SGI Peptide ID NO. AGRMET1T218535
  misc_feature (4)..(204): Pfam Id: PF01338 Pfam Desc: Bacillus thuringiensis toxin
  misc_feature (1)..(195): NCBI GI: 14017442 Blast Desc: insecticidal crystal protein CryET29 [Bacillus thuringiensis]
  misc_feature (1)..(195): NCBI GI: 228925032 Blast Desc: Insecticidal crystal protein CryET29 [Bacillus thuringiensis serovar huazhongensis BGSC 4BD1] gi|228834609|gb|EEM80119.1| Insecticidal crystal protein CryET29
  misc_feature (5)..(194): NCBI GI: 17977983 Blast Desc: Cyt2Bc protein [Bacillus thuringiensis serovar medellin]
  misc_feature (5)..(194): NCBI GI: 342360662 Blast Desc: toxin [Bacillus thuringiensis]
  misc_feature (5)..(194): NCBI GI: 209168619 Blast Desc: Cyt2Ba [Bacillus thuringiensis serovar israelensis]
  misc_feature (5)..(194): NCBI GI: 161598575 Blast Desc: type-2BAa cytolytic delta-endotoxin [Bacillus thuringiensis serovar israelensis] gi|228905722|ref|ZP_04069644.1| Type-2Ba cytolytic [Bacillus IBL
  misc_feature (5)..(194): NCBI GI: 209168617 Blast Desc: Cyt2Ba [Bacillus thuringiensis]
  misc_feature (5)..(194): NCBI GI: 7141139 Blast Desc: AF215646_1 cytolytic toxin Cyt2Ba8 [Bacillus thuringiensis]
  misc_feature (11)..(194): NCBI GI: 194319966 Blast Desc: AF215646_1 cytolytic toxin Cyt2Ba8 [Bacillus thuringiensis]
  misc_feature (5)..(194): NCBI GI: 8469212 Blast Desc: CT2BB_BACTJ RecName: Full=Type-2Bb cytolytic delta-endotoxin; AltName: Full=30 kDa cytolytic toxin gi|2228582|gb|AAB93477.1| cytolytic toxin [Bacillus
  misc_feature: Useful for conferring pesticidal activity to an organism
  misc_feature: Useful for controlling a pest organism
MYNKRIINLEIPSYNAINFLEIYRLPQVHLNQALNITQHLQKSLSLQTLNLEFDQLNDLISEIPGGSILNTIDQRVEYSEINTTCAINNIVDIVKSNCEMFEDDFLLQSKLESVISNVFLNLANQEKNSYVFYHEKLSHKTSYSYHVIFVIDNMESSLNVFPISFNINVDSSYENLNKNSISDLQSYKIKISGINFAISKNNELAEIMERVTESTL

SEQ ID NO: 99 - DNA, 882 bp, Bacillus sp.
  misc_feature: SGI cDNA ID NO. AGRMET1G581825
  misc_feature: Encodes the peptide sequence at SEQ ID NO. 100
  misc_feature: Useful for conferring pesticidal activity to an organism
  misc_feature: Useful for controlling a pest organism
atggcaatatttgatttagatgcatatttgttaccaatagtaaaaaagatacctgtatacggttcattgataaatgctgtagatacttcaagtttaacaatcaaaaatgcagaaagttatggctttgaaattaaaaatagtaaacctcaaggtacaatgtttataggagaatctgaacttaagaatgacacgaatcaaactcaaacactgtattcgaatagttttaccaaaaccattactgattccgtaactctttcagtaacaaatggagtatcagctggagttaatataagtattggtgggaaaatctttggcatgggtgtagaaacaagtatgtcgttcgaggttagtacaagtactactaatgaacaaacgagtgaagaatcagttgcatacacagtccctagccaaccggttgttgtgcctgccaaaaagacatattatgtctatacttcactacaaagaagtcaattagaaggaagtatccgcttaagagcagatttatctgatggtttccttgcaaagttcaatccagacgctggattacctattggtgatatatatgaatttataaaacctcaacagttagctcatcctttaccaagtggaatttcattaaatcacaataataaatccgtccattttgaagggattgcagaatatatctatggtacaggtacaaagttttatgtcactataacagatacaccttcttcacaaggaactcaagagcataagccaattgatgctaaaactgggcttggcacttatgaaattcagttagatgggaaaaaattaggttttgatattaatgatctaaaagacaaaatggatcctaaagattttgaaaaacttaaagaattacaaaatgaaatagtgtaa

SEQ ID NO: 100 - protein, 293 aa, Bacillus sp.
  misc_feature: SGI Peptide ID NO. AGRMET1T581825
  misc_feature (44)..(244): Pfam Id: PF03318 Pfam Desc: Clostridium epsilon toxin ETX/Bacillus mosquitocidal toxin MTX2
  misc_feature (35)..(168): NCBI GI: 1302634 Blast Desc: 35.8-kilodalton mosquitocidal toxin [Lysinibacillus sphaericus] gi|1302636|gb|AAB36656.1| 35.8-kilodalton mosquitocidal toxin [Lysinibacillus sphaericus] 35.8-kilodalton
  misc_feature (35)..(168): NCBI GI: 1302632 Blast Desc: 35.8-kilodalton mosquitocidal toxin [Lysinibacillus sphaericus]
  misc_feature (35)..(168): NCBI GI: 1302638 Blast Desc: 35.8-kilodalton mosquitocidal toxin [Lysinibacillus sphaericus] gi|1302640|gb|AAB36658.1| 35.8-kilodalton mosquitocidal toxin [Lysinibacillus sphaericus] 35.8-kilodalton
  misc_feature (35)..(168): NCBI GI: 169828327 Blast Desc: mosquitocidal toxin gene [Lysinibacillus sphaericus C3-41] gi|168992815|gb|ACA40355.1| 35.8-kilodalton mosquitocidal toxin gene, complete cds [Lysinibacillus sphaericus C3-41]
  misc_feature (47)..(168): NCBI GI: 85542860 Blast Desc: Sip1A [Bacillus thuringiensis]
  misc_feature (52)..(233): NCBI GI: 331268183 Blast Desc: epsilon-toxin type B [Clostridium botulinum BKT015925] gi|329127733|gb|AEB77673.1| epsilon-toxin type B [Clostridium botulinum BKT015925]
  misc_feature (2)..(168): NCBI GI: 228949369 Blast Desc: bthur0007_54850 [Bacillus thuringiensis serovar monterrey BGSC 4AJ1] gi|228810352|gb|EEM56710.1| bthur0007_54850 [Bacillus thuringiensis serovar monterrey BGSC 4AJ1]
  misc_feature (52)..(233): NCBI GI: 225166784 Blast Desc: pC2C203U28_p051 [Clostridium botulinum] gi|253771427|ref|YP_003034260.1| epsilon-toxin type B [Clostridium botulinum D str. 1873] gi|225007353|dbj|BAH29452.1|
  misc_feature (54)..(164): NCBI GI: 169825571 Blast Desc: Mtx2/3 toxin-like protein [Lysinibacillus sphaericus C3-41] gi|169828676|ref|YP_001698834.1| Mtx2/3 toxin-like protein [Lysinibacillus sphaericus C3-41] gi|168993164|gb|ACA40704.1|
  misc_feature (52)..(233): NCBI GI: 331268184 Blast Desc: epsilon-toxin type B [Clostridium botulinum BKT015925] gi|329127734|gb|AEB77674.1| epsilon-toxin type B [Clostridium botulinum BKT015925]
  misc_feature: Useful for conferring pesticidal activity to an organism
  misc_feature: Useful for controlling a pest organism
MAIFDLDAYLLPIVKKIPVYGSLINAVDTSSLTIKNAESYGFEIKNSKPQGTMFIGESELKNDTNQTQTLYSNSFTKTITDSVTLSVTNGVSAGVNISIGGKIFGMGVETSMSFEVSTSTTNEQTSEESVAYTVPSQPVVVPAKKTYYVYTSLQRSQLEGSIRLRADLSDGFLAKFNPDAGLPIGDIYEFIKPQQLAHPLPSGISLNHNNKSVHFEGIAEYIYGTGTKFYVTITDTPSSQGTQEHKPIDAKTGLGTYEIQLDGKKLGFDINDLKDKMDPKDFEKLKELQNEIV

SEQ ID NO: 101 - DNA, 954 bp, Bacillus sp.
  misc_feature: SGI cDNA ID NO. AGRMET1G218655
  misc_feature: Encodes the peptide sequence at SEQ ID NO. 102
  misc_feature: Useful for conferring pesticidal activity to an organism
  misc_feature: Useful for controlling a pest organism
atgaaaaaaaacagtaaaaagacaaaacagattttatctctagccatgattggtgctattagttcatcatttgcatttacatccccaggttcagtaagtgcggctcaaattaattctgttcaaaacattgcacaacagcaaaatgcatatatagcagattggcgtgaaccttttcaaaacacctatagatatatgcgcgatttgtttccttaccatttttcttccgaagaagctaaatatgaacttactaaaattcaccagacatcagtagaacaaattggttcacctactattactaattcgagtagtttatttgtagggagatctactttaactaataatactaaccaagatcaaacacttactacaaacgaattttcgaagacttttgaaaattccgttacaaattctactacgaatggatttaatttaggggcaagcgcttctgcaacatttaaaattccattagttggagaaacaagtattgaactttctactgaatataatttttcagacacaaaggaaacaacaaaatctgaaagttacacatatactgctagcgcacaaaatattatagtacccgcaaattcatctgtagaagttgttgtaagcttaaatactgctaaaataaatggaaatgtaaacctgctttctcgcatggatggaacaatttcttacgatacacagatgtccacttcttctagagttacagaaccactatcgacctttacaaaaacagctttgctatggggatcacgaaatgatttaagagttgatcaaaataataatttatatttaatagggaaagggaaatactcagcagagtatggaacggaattccttgtaactgtgagacctgttgagaaacctagaggatttactgctgcacctagtgagttgactactgaaggttacacatatacagtaaagccagaagttaaaaaagaacagtaa

SEQ ID NO: 102 - protein, 317 aa, Bacillus sp.
  misc_feature: SGI Peptide ID NO. AGRMET1T218655
  misc_feature (88)..(285): Pfam Id: PF03318 Pfam Desc: Clostridium epsilon toxin ETX/Bacillus mosquitocidal toxin MTX2
  misc_feature (93)..(230): Pfam Id: PF01117 Pfam Desc: Aerolysin toxin
  misc_feature (78)..(314): NCBI GI: 331268183 Blast Desc: epsilon-toxin type B [Clostridium botulinum BKT015925] gi|329127733|gb|AEB77673.1| epsilon-toxin type B [Clostridium botulinum BKT015925]
  misc_feature (1)..(285): NCBI GI: 1302638 Blast Desc: 35.8-kilodalton mosquitocidal toxin [Lysinibacillus sphaericus] gi|1302640|gb|AAB36658.1| 35.8-kilodalton mosquitocidal toxin [Lysinibacillus sphaericus] 35.8-kilodalton
  misc_feature (1)..(285): NCBI GI: 1302634 Blast Desc: 35.8-kilodalton mosquitocidal toxin [Lysinibacillus sphaericus] gi|1302636|gb|AAB36656.1| 35.8-kilodalton mosquitocidal toxin [Lysinibacillus sphaericus] 35.8-kilodalton
  misc_feature (7)..(285): NCBI GI: 1302632 Blast Desc: 35.8-kilodalton mosquitocidal toxin [Lysinibacillus sphaericus]
  misc_feature (7)..(285): NCBI GI: 169828327 Blast Desc: mosquitocidal toxin gene [Lysinibacillus sphaericus C3-41] gi|168992815|gb|ACA40355.1| 35.8-kilodalton mosquitocidal toxin gene, complete cds [Lysinibacillus sphaericus C3-41]
  misc_feature (7)..(285): NCBI GI: 126653152 Blast Desc: BB14905_15435 [Bacillus sp. B14905] gi|126590068|gb|EAZ84194.1| BB14905_15435 [Bacillus sp. B14905]
  misc_feature (94)..(287): NCBI GI: 339008315 Blast Desc: BRLA_c21160 [Brevibacillus laterosporus LMG 15441] gi|338774115|gb|EGP33645.1| BRLA_c21160 [Brevibacillus laterosporus LMG 15441]
  misc_feature (1)..(282): NCBI GI: 228988874 Blast Desc: bthur0001_55080 [Bacillus thuringiensis serovar tochigiensis BGSC 4Y1] gi|228770867|gb|EEM19381.1| bthur0001_55080 [Bacillus thuringiensis serovar tochigiensis BGSC
  misc_feature (1)..(285): NCBI GI: 399461 Blast Desc: ETXB_CLOPE RecName: Full=Epsilon-toxin type B; Flags: Precursor gi|144804|gb|AAA23236.1| epsilon-toxin [Clostridium perfringens] gi|383773|prf||1904212A epsilon toxin
  misc_feature (1)..(285): NCBI GI: 168210894 Blast Desc: epsilon-toxin [Clostridium perfringens B str. ATCC 3626] gi|182625455|ref|ZP_02953227.1| epsilon-toxin [Clostridium perfringens D str. JGS1721] gi|209947607|ref|YP_002291114.1| B D
  misc_feature: Useful for conferring pesticidal activity to an organism
  misc_feature: Useful for controlling a pest organism
MKKNSKKTKQILSLAMIGAISSSFAFTSPGSVSAAQINSVQNIAQQQNAYIADWREPFQNTYRYMRDLFPYHFSSEEAKYELTKIHQTSVEQIGSPTITNSSSLFVGRSTLTNNTNQDQTLTTNEFSKTFENSVTNSTTNGFNLGASASATFKIPLVGETSIELSTEYNFSDTKETTKSESYTYTASAQNIIVPANSSVEVVVSLNTAKINGNVNLLSRMDGTISYDTQMSTSSRVTEPLSTFTKTALLWGSRNDLRVDQNNNLYLIGKGKYSAEYGTEFLVTVRPVEKPRGFTAAPSELTTEGYTYTVKPEVKKEQ

SEQ ID NO: 103 - DNA, 1425 bp, Bacillus sp.
  misc_feature: SGI cDNA ID NO. AGRMET1G594567
  misc_feature: Encodes the peptide sequence at SEQ ID NO. 104
  misc_feature: Useful for conferring pesticidal activity to an organism
  misc_feature: Useful for controlling a pest organism
acatgggagaattattataacaagccttctactagcacatacaactataataactatggtactgcatccacttacaataaaccaactacagtggcaagtgcttgggagaattattataacaaacctgctactaatacgtataactataataactatggtactgcatctacttacaataaaccaactacagtagcaagcgcttgggagaattactataacaagccttctactaatacgaatggaaatagtagcactgcatctacttctaataaaccaacaacagtagcaagtgcttgggagaattactataacaagccttctactaatacgaatacatcagctacttcagataacaagcagcgaccaaaaagagaaacgtctggacaagacactaatcaaaattatcagattgaacaaccaccagcaccgagtccaaactataaatttataaaaaaagtatactatgtagataaaaataaatgggtaggactatatcaaaacacacaaaactctgaatattatgtttatgatgctcgaaattatcaaagtggaactcttaatggggataactttgctaaaacatcaatgacaccaaatacaaatcaaaacacagaaggttcaacaataattgctgctgctcaacaattaccaccacaaccttctttacaacaagtattaatggcacttcatactacaaaagactttaaaccagaacatgtaaatattgattcattaagtttgaaaatgcaatcagtatcacctgatgtacctacaaaagtttcagaaggtaatgtaaaaattgatctaggagctcatagtactatgattaataattctaacaggccagaaacacgagtgtctgggtcaatgtcacaaacaattacagattcaatcacagtaactaatacttatggtttcaaaataggaggatcttataaatatacagcttcagttccaggagtatcttcgtgggaactatcatttaatactgaatttaactatagtaatgcaaaagctactgcaacttcaaatgcaataacttatacaataccatcacaaacaattgaaatacctgcaaattcaaaagctgttgtaacatcatatttaacaaaaacaaaatacaaaggtcaaatgaatataaaagctgaattagaaggaaactacgaagtctatgctaataataaacaaaacggtaacttaaatgcaggtattactttacaaactacttctgctcaagctgctcaagtgttaaagcaaaaaggattatatttaaccccatatgaaaataaagcgatgttcgaagggaaattaccatacgaagtagaaaatgcaggagaattcgttacagaagtaagatattatagtcttgcatacccatatcaagaagttaaacctgcagaaaaacttcaatcacaaaaaaggtaa

SEQ ID NO: 104 - protein, 474 aa, Bacillus sp.
  misc_feature: SGI Peptide ID NO. AGRMET1T594567
  misc_feature (272)..(456): Pfam Id: PF03318 Pfam Desc: Clostridium epsilon toxin ETX/Bacillus mosquitocidal toxin MTX2
  misc_feature (271)..(392): NCBI GI: 169828327 Blast Desc: mosquitocidal toxin gene [Lysinibacillus sphaericus C3-41] gi|168992815|gb|ACA40355.1| 35.8-kilodalton mosquitocidal toxin gene, complete cds [Lysinibacillus sphaericus C3-41]
  misc_feature (271)..(392): NCBI GI: 1302638 Blast Desc: 35.8-kilodalton mosquitocidal toxin [Lysinibacillus sphaericus] gi|1302640|gb|AAB36658.1| 35.8-kilodalton mosquitocidal toxin [Lysinibacillus sphaericus] 35.8-kilodalton
  misc_feature (271)..(392): NCBI GI: 1302634 Blast Desc: 35.8-kilodalton mosquitocidal toxin [Lysinibacillus sphaericus] gi|1302636|gb|AAB36656.1| 35.8-kilodalton mosquitocidal toxin [Lysinibacillus sphaericus] 35.8-kilodalton
  misc_feature (271)..(392): NCBI GI: 1302632 Blast Desc: 35.8-kilodalton mosquitocidal toxin [Lysinibacillus sphaericus]
  misc_feature (271)..(392): NCBI GI: 126653152 Blast Desc: BB14905_15435 [Bacillus sp. B14905] gi|126590068|gb|EAZ84194.1| BB14905_15435 [Bacillus sp. B14905]
  misc_feature (271)..(452): NCBI GI: 228937010 Blast Desc: bthur0009_54170 [Bacillus thuringiensis serovar andalousiensis BGSC 4AW1] gi|228822658|gb|EEM68551.1| bthur0009_54170 [Bacillus thuringiensis serovar andalousiensis
  misc_feature (275)..(384): NCBI GI: 167461657 Blast Desc: Plarl_03715 [Paenibacillus larvae subsp. larvae BRL-230010]
  misc_feature (275)..(384): NCBI GI: 322381617 Blast Desc: PL1_1452 [Paenibacillus larvae subsp. larvae B-3650] gi|321154425|gb|EFX46729.1| PL1_1452 [Paenibacillus larvae subsp. larvae B-3650]
  misc_feature (275)..(384): NCBI GI: 322382739 Blast Desc: PL1_1536 [Paenibacillus larvae subsp. larvae B-3650] gi|321153291|gb|EFX45732.1| PL1_1536 [Paenibacillus larvae subsp. larvae B-3650]
  misc_feature (271)..(395): NCBI GI: 228924919 Blast Desc: 35.8-kilodalton mosquitocidal toxin [Bacillus thuringiensis serovar huazhongensis BGSC 4BD1] gi|228834731|gb|EEM80219.1| 35.8-kilodalton mosquitocidal toxin
  misc_feature: Useful for conferring pesticidal activity to an organism
  misc_feature: Useful for controlling a pest organism
TWENYYNKPSTSTYNYNNYGTASTYNKPTTVASAWENYYNKPATNTYNYNNYGTASTYNKPTTVASAWENYYNKPSTNTNGNSSTASTSNKPTTVASAWENYYNKPSTNTNTSATSDNKQRPKRETSGQDTNQNYQIEQPPAPSPNYKFIKKVYYVDKNKWVGLYQNTQNSEYYVYDARNYQSGTLNGDNFAKTSMTPNTNQNTEGSTIIAAAQQLPPQPSLQQVLMALHTTKDFKPEHVNIDSLSLKMQSVSPDVPTKVSEGNVKIDLGAHSTMINNSNRPETRVSGSMSQTITDSITVTNTYGFKIGGSYKYTASVPGVSSWELSFNTEFNYSNAKATATSNAITYTIPSQTIEIPANSKAVVTSYLTKTKYKGQMNIKAELEGNYEVYANNKQNGNLNAGITLQTTSAQAAQVLKQKGLYLTPYENKAMFEGKLPYEVENAGEFVTEVRYYSLAYPYQEVKPAEKLQSQKR

SEQ ID NO: 105 - DNA, 1128 bp, Bacillus sp.
  misc_feature: SGI cDNA ID NO. AGRMET1G218847
  misc_feature: Encodes the peptide sequence at SEQ ID NO. 106
  misc_feature: Useful for conferring pesticidal activity to an organism
  misc_feature: Useful for controlling a pest organism
atggtggggaaaagattagtgggaacactactagttacaagtttattgggtggtacaagcattagtatgttgcctatatccaaagtttatgccgcagaaaactctatggaaacggattttcaaacatttctagcgcatactttggaaggaaagtatgggaattggcgtgatggaatatatgcaggtacattttttaatttgagtgattcttctctagagatgaaggctcagttgatgcaatctgtctatttattagatcgttctcaaataccattgatcattgaacagttaaaaaagaaagatcaattagaattaacagatatatttcaaatagtaacacctggagcaactttagataaaaatgttcaaaagcatccgtggttaaatgtaacaacagattcacagactaaaataaatattgataaaacagaaaatatagattcgcccattggcactttaactcaacttaacaatccaacagatacaagagcaacagggtatgcaacaagtgtatctaaaaggtttacaaatacaatttctacaaccaatacaaatactgtggcactcggcatgaaacaaactgtaaaaggtggcattgactttttaggaattgcagaaggggatttttcacaagaatttagtgaaacatatacgtattcaaatgcatcacaaacgctttcatctgaagaaacaacaatatcgagtcaacctctttccattgatcttccagcacgtagtaattatgaaattactatgatttttcaacaagtaaaacaaagtggaacagtaacaggaacgtcaaatctgagtggtggatatagtgtatccaaagataatattgcttttgatttaagtatttataaaaaaattaaagtgattcaagatttataccctgaactttggaatgtattaaaagaaaaaggtatcgatataaatgataatgttcaacaagtagtttatacaggcggaattggttttgaaagcattaaaggcgcaaaggttatagcatcaattaaagatttgaataaaggacaaagaaagctggaagaagttattccgataaaatctggttcaaatacggacattagttctcaattaaagaatacaattcaatcaactgtgcgataa

SEQ ID NO: 106 - protein, 375 aa, Bacillus sp.
  misc_feature: SGI Peptide ID NO. AGRMET1T218847
  misc_feature (138)..(340): Pfam Id: PF03318 Pfam Desc: Clostridium epsilon toxin ETX/Bacillus mosquitocidal toxin MTX2
  misc_feature: Useful for conferring pesticidal activity to an organism
  misc_feature: Useful for controlling a pest organism
MVGKRLVGTLLVTSLLGGTSISMLPISKVYAAENSMETDFQTFLAHTLEGKYGNWRDGIYAGTFFNLSDSSLEMKAQLMQSVYLLDRSQIPLIIEQLKKKDQLELTDIFQIVTPGATLDKNVQKHPWLNVTTDSQTKINIDKTENIDSPIGTLTQLNNPTDTRATGYATSVSKRFTNTISTTNTNTVALGMKQTVKGGIDFLGIAEGDFSQEFSETYTYSNASQTLSSEETTISSQPLSIDLPARSNYEITMIFQQVKQSGTVTGTSNLSGGYSVSKDNIAFDLSIYKKIKVIQDLYPELWNVLKEKGIDINDNVQQVVYTGGIGFESIKGAKVIASIKDLNKGQRKLEEVIPIKSGSNTDISSQLKNTIQSTVR

SEQ ID NO: 107 - DNA, 891 bp, Bacillus sp.
  misc_feature: SGI cDNA ID NO. AGRMET1G655671
  misc_feature: Encodes the peptide sequence at SEQ ID NO. 108
  misc_feature: Useful for conferring pesticidal activity to an organism
  misc_feature: Useful for controlling a pest organism
atgaaaaaattaatgttttcattagtagcaacaactatgagtatgggattaatttttggatccgcacccgcaaaagcagatgtaagtagcagaaatagtgcatatcaggatattgacgagagagttaagaaaatggcgcagagtgctgcttggggggggcaagagtacagaagtcataatataaaagatattgaattaaagggtaatcttatcgatggttctatggttgaaaattcacaagtattaactgtttcgtcagatattttagaaaataatttagggcataccgtaaatatgcctagcactgggtatgaacatgagtttgaagaaacgactagtacaactaatacaagcggatggacatttggatataattataacgcaagtttttcggtattgatggtttcagcttcacaaagttttagtgttgaatataacatgtctacttcagacactcatgaaacaaaggagaaaagaaaatttactgttccttcaatagaagttccagttcctgctggaaaaaaatataaagttgaatatgtatttgaaaaagttaaggtttcaggaaaaaataaaattgatgcaaatctctacggtgatgttacttattattataataatcagccgatgtcaccacagcttttatattcagtacaaggacttgcagctgataagcaaggatttgagcaagtcataagagattcagctgtagggaacgatagatttggaattaagactacaggtattggccagtttagcactgagtttggaacacgtctaactagaactcttacagacattactgattctagaaatccagtaaaactagagacgaaaaatgtcccagttgagtttaaaacactttcgactgacactagagtaattaaataa

SEQ ID NO: 108 - protein, 296 aa, Bacillus sp.
  misc_feature: SGI Peptide ID NO. AGRMET1T655671
  misc_feature (72)..(219): Pfam Id: PF03318 Pfam Desc: Clostridium epsilon toxin ETX/Bacillus mosquitocidal toxin MTX2
  misc_feature (89)..(216): NCBI GI: 85542860 Blast Desc: Sip1A [Bacillus thuringiensis]
  misc_feature (2)..(284): NCBI GI: 228949369 Blast Desc: bthur0007_54850 [Bacillus thuringiensis serovar monterrey BGSC 4AJ1] gi|228810352|gb|EEM56710.1| bthur0007_54850 [Bacillus thuringiensis serovar monterrey BGSC 4AJ1]
  misc_feature (76)..(289): NCBI GI: 315150965 Blast Desc: conserved [Enterococcus faecalis TX0012]
  misc_feature (1)..(270): NCBI GI: 228988874 Blast Desc: bthur0001_55080 [Bacillus thuringiensis serovar tochigiensis BGSC 4Y1] gi|228770867|gb|EEM19381.1| bthur0001_55080 [Bacillus thuringiensis serovar tochigiensis BGSC
  misc_feature (89)..(216): NCBI GI: 228942854 Blast Desc: bthur0008_54690 [Bacillus thuringiensis serovar berliner ATCC 10792] gi|228976754|ref|ZP_04137171.1| bthur0003_64080 [Bacillus thuringiensis serovar thuringiensis
  misc_feature (72)..(285): NCBI GI: 228937010 Blast Desc: bthur0009_54170 [Bacillus thuringiensis serovar andalousiensis BGSC 4AW1] gi|228822658|gb|EEM68551.1| bthur0009_54170 [Bacillus thuringiensis serovar andalousiensis
  misc_feature: Useful for conferring pesticidal activity to an organism
  misc_feature: Useful for controlling a pest organism
MKKLMFSLVATTMSMGLIFGSAPAKADVSSRNSAYQDIDERVKKMAQSAAWGGQEYRSHNIKDIELKGNLIDGSMVENSQVLTVSSDILENNLGHTVNMPSTGYEHEFEETTSTTNTSGWTFGYNYNASFSVLMVSASQSFSVEYNMSTSDTHETKEKRKFTVPSIEVPVPAGKKYKVEYVFEKVKVSGKNKIDANLYGDVTYYYNNQPMSPQLLYSVQGLAADKQGFEQVIRDSAVGNDRFGIKTTGIGQFSTEFGTRLTRTLTDITDSRNPVKLETKNVPVEFKTLSTDTRVIK

SEQ ID NO: 109 - DNA, 1074 bp, Bacillus sp.
  misc_feature: SGI cDNA ID NO. AGRMET1G587003
  misc_feature: Encodes the peptide sequence at SEQ ID NO. 110
  misc_feature: Useful for conferring pesticidal activity to an organism
  misc_feature: Useful for controlling a pest organism
atgaaaaaatataaaaaattattaatggttgctccacttgcgtgtatgttaggtactggggcgtttgctttaccaaatgcatcttatgcagatcaaccagaatcatactggtcaataagttcagaagctttcagcaagtattcgaaagaaaacctagcaaaagcctttagctatgacctaattggtactctcaatactaatcgtgaattacgagcaaaatttaaacttgcaaatgatgaaataatacagtatgaaatgccctctagtgctaataaacctgaaatttattatggtttactagatcaattgagcaagatagaatttggacttaagggaacatcttttaatgttaatgcaaatatagatagttatgaagatttaggtcaaacgaatttgttaacttttaataatgatgatggtgttgtaccacaaacactaacgacaccagaaacgacaaaaacacttacagaatctatgactactacaaatcaatatggaatgaaggtggggtttgaggccgctacaaaattttcagctagtctagttggtatagtgtccggtgaacaaagctttaaattgagtaccgaatttaattataatcatacagattcaaacactactactaaatcgaccgctgttacctttaaatcacaacaagtagttgctgctccaggtggaacaacaagttattacggtacgattaaaaaagctaaattctctggaacattccaatctgacgcgtatttatcaggtgtaacattgaagctacctataatttgtttgaccaccgacggcgacttcaaccgtaatgtagtacgcactgaagaagttactctaactgcaaaagatatctatactatttataaagagaatgcagggagattaccgaaatatttaagcttcgacgatcagaaccaaaaagtaatattgaacaaagcagactttggatttacaggagaaggtggttaccaatcatctgttcaagtgaaattcactccaaaagatccaaataaaactgaacaagtaatgccatataaagactacgtagcaaaagcacaacaaggcactttataa

SEQ ID NO: 110 - protein, 357 aa, Bacillus sp.
  misc_feature: SGI Peptide ID NO. AGRMET1T587003
  misc_feature (134)..(270): Pfam Id: PF03318 Pfam Desc: Clostridium epsilon toxin ETX/Bacillus mosquitocidal toxin MTX2
  misc_feature: Useful for conferring pesticidal activity to an organism
  misc_feature: Useful for controlling a pest organism
MKKYKKLLMVAPLACMLGTGAFALPNASYADQPESYWSISSEAFSKYSKENLAKAFSYDLIGTLNTNRELRAKFKLANDEIIQYEMPSSANKPEIYYGLLDQLSKIEFGLKGTSFNVNANIDSYEDLGQTNLLTFNNDDGVVPQTLTTPETTKTLTESMTTTNQYGMKVGFEAATKFSASLVGIVSGEQSFKLSTEFNYNHTDSNTTTKSTAVTFKSQQVVAAPGGTTSYYGTIKKAKFSGTFQSDAYLSGVTLKLPIICLTTDGDFNRNVVRTEEVTLTAKDIYTIYKENAGRLPKYLSFDDQNQKVILNKADFGFTGEGGYQSSVQVKFTPKDPNKTEQVMPYKDYVAKAQQGTL

SEQ ID NO: 111 - DNA, 1065 bp, Bacillus sp.
  misc_feature: SGI cDNA ID NO. AGRMET1G218951
  misc_feature: Encodes the peptide sequence at SEQ ID NO. 112
  misc_feature: Useful for conferring pesticidal activity to an organism
  misc_feature: Useful for controlling a pest organism
atgaaacataaaaaatccaaaaaaactgtacttgcaacagcagctgtattctcgataggtcttacgggattcagcggggcatcttctgcattcgcgtctgaaaacgcttcatccattgcggaaaataaggttattccaattaagatttctggtcaattttatggtgcatatgatatgaattttgatgattttgtaaattgggtacttcgacgagatggacatttagcaaaggatcctaattatacacgtattacagatataaaggatacaggtaccaaagttgtaagtacagatagaatgtcacatgctaatactacttcagaagaacaaacctggaaagttcccactagagaatttacctactcagatggcataactgtaacaacaactcaaaattttacgtttggacaagaaattggttttgaagctggggttgatgctatagctggaaaagtaacaggtaaattttctttccaacaagccattggaaaatctgaagctaatattacatcaagcacagaaaagactacatatggtggtggaacttataaagtaaaaccgggacataaattagaggcaacttatgaattcgttcgaaaaacttactcaggcaaagcggaaaatacatcagaagtaacgggtgatgtaggatcatggattggtaatatatctttagtatatgataattatgatggattgtaccgttaccacggtggtcaaggaaatgttaattatcatggtttagatttagaaaaggatcttggtggtctaaaacaaagagattatcctcagacgcaacttcatagtgcatatgatatatttaaattagcggataataaggattatggtattgtaaatcacctaagtataggagttccaactagaggagacagttacaaattacctagaacagaaatcaaagaccgagtagtatttgatgatgtaaataaaagagcatttattaaaaatgccactgtcccatttgaaggagcaagtgggtgtgaaattcaggaagtaataaaagatgtaactactggagaggtacttggtacaaaaactctttag

SEQ ID NO: 112 - protein, 354 aa, Bacillus sp.
  misc_feature: SGI Peptide ID NO. AGRMET1T218951
  misc_feature (102)..(228): Pfam Id: PF03318 Pfam Desc: Clostridium epsilon toxin ETX/Bacillus mosquitocidal toxin MTX2
  misc_feature: Useful for conferring pesticidal activity to an organism
  misc_feature: Useful for controlling a pest organism
MKHKKSKKTVLATAAVFSIGLTGFSGASSAFASENASSIAENKVIPIKISGQFYGAYDMNFDDFVNWVLRRDGHLAKDPNYTRITDIKDTGTKVVSTDRMSHANTTSEEQTWKVPTREFTYSDGITVTTTQNFTFGQEIGFEAGVDAIAGKVTGKFSFQQAIGKSEANITSSTEKTTYGGGTYKVKPGHKLEATYEFVRKTYSGKAENTSEVTGDVGSWIGNISLVYDNYDGLYRYHGGQGNVNYHGLDLEKDLGGLKQRDYPQTQLHSAYDIFKLADNKDYGIVNHLSIGVPTRGDSYKLPRTEIKDRVVFDDVNKRAFIKNATVPFEGASGCEIQEVIKDVTTGEVLGTKTL

SEQ ID NO: 113 - DNA, 1056 bp, Bacillus sp.
  misc_feature: SGI cDNA ID NO. AGRMET1G218961
  misc_feature: Encodes the peptide sequence at SEQ ID NO. 114
  misc_feature: Useful for conferring pesticidal activity to an organism
  misc_feature: Useful for controlling a pest organism
atgaaacacaaaaattcaaaaaaggctgtacttgcaacagcagctatattttcgataggctttacaggattaagtgaagcaccttctgcatttgcagctgaaaaccccacgcccattgcagaaaataaaactatgccaaataaaataaatggtgaatattatcgcacaggtgaattcggtatgggttttgatgattttgtacattgggtacttcgacgagatggacatctagcacaggaatctaatttcacacgtattacagatatcagagatacgggtactaaagttgtaagcgcagataagatgtcacatactaatactacttcagaagaacagacttggaaagttccaactagagaatttacctattcagatggtataactgtgacaacaactgaaaattttaaatttggacaagaagtaggttttgaagccggggttgaagccattgctgggaaagtaaccggaaaattcactttcgaacaagctattggtaaatcagaatcgaacattacatcatctatggaaaagaccacctatggtggaggcacttatcaggtcaaaccaggacacaaattagaagcaacatataactttgttagaaaaacttattcaggaaaagcaattaatacaacagagataaaaggcgatgttggagcttggatgggccatatcagcttaaacatcggccctgaatctgatccaaataaaacgactgctaattaccaccgttatgtgggtggtcaaggaaatcaaggtatctcatcagcaggagttactcaggagcgaatttataacgcatatgatttatttaaaacaattgataatagagaatggggatatgtaaatgcgcttaatataggcgttccaactaggaacgattcttatctcatacctagccaagaaataagaaatagagtaatgtttgatgatgcaaataagagagcgtttataaaagatgcaacggtaccatttacaggcgcaagtggttgcgaaattcaagaagtaataaaagatgtaactacaggagaagtactgagtacaaaaactttttag

SEQ ID NO: 114 - protein, 351 aa, Bacillus sp.
  misc_feature: SGI Peptide ID NO. AGRMET1T218961
  misc_feature (98)..(226): Pfam Id: PF03318 Pfam Desc: Clostridium epsilon toxin ETX/Bacillus mosquitocidal toxin MTX2
  misc_feature: Useful for conferring pesticidal activity to an organism
  misc_feature: Useful for controlling a pest organism
MKHKNSKKAVLATAAIFSIGFTGLSEAPSAFAAENPTPIAENKTMPNKINGEYYRTGEFGMGFDDFVHWVLRRDGHLAQESNFTRITDIRDTGTKVVSADKMSHTNTTSEEQTWKVPTREFTYSDGITVTTTENFKFGQEVGFEAGVEAIAGKVTGKFTFEQAIGKSESNITSSMEKTTYGGGTYQVKPGHKLEATYNFVRKTYSGKAINTTEIKGDVGAWMGHISLNIGPESDPNKTTANYHRYVGGQGNQGISSAGVTQERIYNAYDLFKTIDNREWGYVNALNIGVPTRNDSYLIPSQEIRNRVMFDDANKRAFIKDATVPFTGASGCEIQEVIKDVTTGEVLSTKTF

SEQ ID NO: 115 - DNA, 612 bp, Bacillus sp.
  misc_feature: SGI cDNA ID NO. AGRMET1G619806
  misc_feature: Encodes the peptide sequence at SEQ ID NO. 116
  misc_feature: Useful for conferring pesticidal activity to an organism
  misc_feature: Useful for controlling a pest organism
atgttgcctattacgtcttatgcagctgaaacgaacaaacttccccattccgaaatcagcataacaaatcgtatgcaagctaaaacagacaccaaagcaatatcttacgcaagcgctagcacagatacagcaaaatctactactatggcaacatttgaacaggatttaaagcaggcaatgataaatataccaaggattcctcaatctaatggtacttggaaagtatataatccatttcacgcgagcaatcttgcgatagttaagacatcattttctttagaaagctttaaagaagtaacagctacagaagcaaaagatataacaacagcagatgatatgcaagaggctacgtatgaaaataccaccgatgtaaaccaaacacacactacaccgtccaaaaagattatcaatacaaattcatttacgtattctaattcagaaggagctaaattaggtgtagaattgtcacatacattcagtgcaaacgtaggtattccaggtgtattaggggctggtggctctacaactacaaaagtgtctactgaattcacttataatcatacaagttccaatacaacgacgcatacagaagaaattacaataccatcttaa

SEQ ID NO: 116 - protein, 203 aa, Bacillus sp.
  misc_feature: SGI Peptide ID NO. AGRMET1T619806
  misc_feature (109)..(203): Pfam Id: PF03318 Pfam Desc: Clostridium epsilon toxin ETX/Bacillus mosquitocidal toxin MTX2
  misc_feature: Useful for conferring pesticidal activity to an organism
  misc_feature: Useful for controlling a pest organism
MLPITSYAAETNKLPHSEISITNRMQAKTDTKAISYASASTDTAKSTTMATFEQDLKQAMINIPRIPQSNGTWKVYNPFHASNLAIVKTSFSLESFKEVTATEAKDITTADDMQEATYENTTDVNQTHTTPSKKIINTNSFTYSNSEGAKLGVELSHTFSANVGIPGVLGAGGSTTTKVSTEFTYNHTSSNTTTHTEEITIPS

SEQ ID NO: 117 - DNA, 1167 bp, Bacillus sp.
  misc_feature: SGI cDNA ID NO. AGRMET1G616666
  misc_feature: Encodes the peptide sequence at SEQ ID NO. 118
  misc_feature: Useful for conferring pesticidal activity to an organism
  misc_feature: Useful for controlling a pest organism
atgaagaaactgaataaacgtaagtttactgcagccgctgtatcattaactattttaggcgggacgttagttagtgcgtcacctactcttgcaaatgctaactctgagataggtatttcatctgaaatatcgcaaaatccaattgatgaaaatggaaatcctgtacaacagaagaaacttttaaatgcagatgagcttaatcgaatggcaaataaaacaatattaacagggtatgataaagatgtttataacggatttgtagacagaataaaaaaattacaaaatgaacccgcaaatatgttggatatgcgtagttatatagcggatttgtatgtcatcaattacgcatatgacagtgcaataaagggtcaggcttttaaagagtatgtatttcttggcgtttcaaaaacgatgaaaggagcattactcaataacaatatatattttaattggaaaaaaggcgaaataaaaaatataggggatccaattgtaaatattttagatcctcaaggtgtgtttatcggtgaagacgcatggaaaaatgctacgggcagtatacaaaaatggaacaccgttaagatggacaaaaaaattacaaataaaatgacgaaaacaatctctcacggatttgagttgaacataccagttgaagttgtttatggtgcggctgaatttgcttttgatgccacttataaatatagtaatgaacagacagaagaaaaaggtagtgagttaaattatgtaataccatcccaagctgtggaaatacaatcaggtcattacgcaatagcgaaaggttctgccattcttgcagattttaaagccgatgtaagtttatatggggaattttcagcaactattaatacagatgcaggaatggggaatcctacatctgtatttcaagtcttagctgcatataaaaaggatctggcacaaggtatttcagttatagatggtggaacaattgttttagatggtaaaggtacaatgaatggtagtgggatgggtgcttctaaatactcatttgaagttgaggagtataaaattggtacaggaccacatccagagtggggaggcaatggttcagccaaaaatgaaaaaccgactaaggttacagagatgcagttagatgaaaaaggcaatgttttagagaaaaaggttaaataa

SEQ ID NO: 118 - protein, 388 aa, Bacillus sp.
  misc_feature: SGI Peptide ID NO. AGRMET1T616666
  misc_feature (165)..(308): Pfam Id: PF03318 Pfam Desc: Clostridium epsilon toxin ETX/Bacillus mosquitocidal toxin MTX2
  misc_feature: Useful for conferring pesticidal activity to an organism
  misc_feature: Useful for controlling a pest organism
MKKLNKRKFTAAAVSLTILGGTLVSASPTLANANSEIGISSEISQNPIDENGNPVQQKKLLNADELNRMANKTILTGYDKDVYNGFVDRIKKLQNEPANMLDMRSYIADLYVINYAYDSAIKGQAFKEYVFLGVSKTMKGALLNNNIYFNWKKGEIKNIGDPIVNILDPQGVFIGEDAWKNATGSIQKWNTVKMDKKITNKMTKTISHGFELNIPVEVVYGAAEFAFDATYKYSNEQTEEKGSELNYVIPSQAVEIQSGHYAIAKGSAILADFKADVSLYGEFSATINTDAGMGNPTSVFQVLAAYKKDLAQGISVIDGGTIVLDGKGTMNGSGMGASKYSFEVEEYKIGTGPHPEWGGNGSAKNEKPTKVTEMQLDEKGNVLEKKVK

SEQ ID NO: 119 - DNA, 1137 bp, Bacillus sp.
  misc_feature: SGI cDNA ID NO. AGRMET1G627497
  misc_feature: Encodes the peptide sequence at SEQ ID NO. 120
  misc_feature: Useful for conferring pesticidal activity to an organism
  misc_feature: Useful for controlling a pest organism
atgttaaaaaagaaccaaataattttttccggaatgaccgtactcacaattgtaggaagcggacttactacatctattccaaccgcatttgctaatacacaagaaaatattacttccttacaatccgtacaggggcaagaattcacagatgaaaatggacaagtaatatcttcaggaacttttgcaaatattagcccgtattggctaattggtgattccaataacgaattatacagtttttacaaccaagtaaaacaacggatagtcgataaacaaaataaagaacaaaatatgttaaagttagatgaatatctgaatgatttatggtttgtcggcgctgtgagtcagttatatgaaacacctaatgaccataataaacgattagaggcatctaatcttgtaagatggtataaaaataataatgctgcaaagccaaatttcgaaattttggaaagtaaactagataatgtagaaccaattttagatatcaccgaaccgattggctatttcgctacagaatcagaatacaccaacgattctccacacaagggagaatatttgatacctggttggtcaaatacgacttcgactacctatactacaacaacgacaaagggctttagcataggtgcgaacagtggaattgaaattccgctcccatttgtggataaactaggtctgacaggaagttataacttttcaaaagtagacaatgtaacaacaacagatagcacaaccttaacaataccagttcaaacgatacaagtttcaccattttctcattcaaaaactagtttctattttcaaacccatcagtatcgagctaaatttgatgtgactgctacatttaaagcagaggtaggtagagatgctgaatacactagaaaacgcagtgccttctatttgttagcaaaatataacgagtatcttccaaaagggattgtagttgagaatggtggaaaattaacgttagaaggtaagggtgaaatcagtgtcccgaatcatataaatggattcaagctagtaaaagagacgaaagaaacacccctatctggtgaagagggaaaaacaataacagaatcctacacgaaaaatccaaatactaataaatttcatcctgaaataaaaaaaccgtaa

SEQ ID NO: 120 - protein, 378 aa, Bacillus sp.
  misc_feature: SGI Peptide ID NO. AGRMET1T627497
  misc_feature (164)..(359): Pfam Id: PF03318 Pfam Desc: Clostridium epsilon toxin ETX/Bacillus mosquitocidal toxin MTX2
  misc_feature: Useful for conferring pesticidal activity to an organism
  misc_feature: Useful for controlling a pest organism
MLKKNQIIFSGMTVLTIVGSGLTTSIPTAFANTQENITSLQSVQGQEFTDENGQVISSGTFANISPYWLIGDSNNELYSFYNQVKQRIVDKQNKEQNMLKLDEYLNDLWFVGAVSQLYETPNDHNKRLEASNLVRWYKNNNAAKPNFEILESKLDNVEPILDITEPIGYFATESEYTNDSPHKGEYLIPGWSNTTSTTYTTTTTKGFSIGANSGIEIPLPFVDKLGLTGSYNFSKVDNVTTTDSTTLTIPVQTIQVSPFSHSKTSFYFQTHQYRAKFDVTATFKAEVGRDAEYTRKRSAFYLLAKYNEYLPKGIVVENGGKLTLEGKGEISVPNHINGFKLVKETKETPLSGEEGKTITESYTKNPNTNKFHPEIKKP

SEQ ID NO: 121 - DNA, 1101 bp, Bacillus sp.
  misc_feature: SGI cDNA ID NO. AGRMET1G637067
  misc_feature: Encodes the peptide sequence at SEQ ID NO. 122
  misc_feature: Useful for conferring pesticidal activity to an organism
  misc_feature: Useful for controlling a pest organism
atgaagaaactgaataaacgtacttttaccgcagccgctacatcattagctattttaggaggtaccctagtcagtgcgccgtctacttttgcagatacaaatttaaaacaaatgcaatctctaagccaaacaaatgtaacagatgaacaaggtaaaataattgccccgcagcaatttgctactttacctggtgattcagctactacaaagttttataacacagttaaaaatcgagtactagaaaaaacgggaaaagatgtaaatttactaaaagtagatgattatttaaatgatttatggtatttaagtaatatgacatggtattgggataatcgtaatcgtgataacattcgtaatatggagaatttcagtaactggtatcagcaacatggaaatacagaaatcaataaaaccagattaaactggctcaaggccgaagtaacaaatatccaagaaacgaaaaatattagtaatccctatggactatatgtagatgaattagaatatgataacacaacaaatttaaaacaaacacggagtctagcagagcgttcagaaattgtaaaaaatacctatacagttacgacaacaaaaggctttagtatcgggggatctgctgaaggatctgctggagctgatattgtgaaggaaattccatttacacttacaaaactaggtgttcaaggaagctttgatttttctgagacaaaagggaaaacagatgaaaaacagctcacacttgcaattggaaaagattctttcgatgtggatccaaattatcacttatacgtaaaacgatttgtagaaacatttagttatcaatatgatgtagatttggttgctgaattccaaggtaaagttggaaaaacgatgggaccaccttctggacaagctcctgaaaaatcagcctttcaattagtagcacaatatgcacaatacctgccaaaaggtatttcagttaagaatggtggtattgttgtgctaaatggaaaaggaaaaattgaagcacctaattttgcaaatggaacaaaaattaagtatgaacaaaagtatcatccaatagggagtccattacaaactaaaacaattgaaccgaaataa

SEQ ID NO: 122 - protein, 366 aa, Bacillus sp.
  misc_feature: SGI Peptide ID NO. AGRMET1T637067
  misc_feature (141)..(336): Pfam Id: PF03318 Pfam Desc: Clostridium epsilon toxin ETX/Bacillus mosquitocidal toxin MTX2
  misc_feature: Useful for conferring pesticidal activity to an organism
  misc_feature: Useful for controlling a pest organism
MKKLNKRTFTAAATSLAILGGTLVSAPSTFADTNLKQMQSLSQTNVTDEQGKIIAPQQFATLPGDSATTKFYNTVKNRVLEKTGKDVNLLKVDDYLNDLWYLSNMTWYWDNRNRDNIRNMENFSNWYQQHGNTEINKTRLNWLKAEVTNIQETKNISNPYGLYVDELEYDNTTNLKQTRSLAERSEIVKNTYTVTTTKGFSIGGSAEGSAGADIVKEIPFTLTKLGVQGSFDFSETKGKTDEKQLTLAIGKDSFDVDPNYHLYVKRFVETFSYQYDVDLVAEFQGKVGKTMGPPSGQAPEKSAFQLVAQYAQYLPKGISVKNGGIVVLNGKGKIEAPNFANGTKIKYEQKYHPIGSPLQTKTIEPK

SEQ ID NO: 123 - DNA, 843 bp, With no toxin genes
  misc_feature: SGI cDNA ID NO. AGRMET1G143415
  misc_feature: Encodes the peptide sequence at SEQ ID NO. 124
  misc_feature: Useful for conferring pesticidal activity to an organism
  misc_feature: Useful for controlling a pest organism
ttgatattattttttattttaatttatggaggaatagcaatgaaactaaaagtacttgcaacaacaggattagcattatcaattggttttactagtttaggagtattagaaaaacctacttttgcagatgaaaccaaagaaaatattgttgtatcacaatcaaattctataaaagggtatttgtataaaaatgggattagaacacctgtatttgaatcctcaaaagctaaatctattggtgcagtagaatttcctgaattaccatcaaatccatcagttggtgtgccgaaagaaggaaaagcagtagaaaatcttggttcaatgggaaatattctatattttgaaggggatgcgcccgacatagtaggtagcataagtggagcaggtagcatcatattaggtaatataagtggcaaaaaactaaaatattatttagaaaaaagagcagatggtacgattgtaattggaggttatgaccccgatacacttcgtttatatccattaaacgtaccgaatcttgcaataaaacctcatacggcatttgataataatactaaattaaaaagagaaacaaagtatgaattaattacatctgacatcatggataatgcagtagcttatagctttgataaaagtataacgcacggtgtatcaacaactggtacagtaggacttgcagtaaccattggtgctaaagtttctacagaagtaggaggcggaattatacctggtaaagtgtcagccgaacttagtacttctttaacgacaagtttttcatttggtattactattacagatgaagagacaatagcacgtcattttagtgtagaaaaagtaaataat

SEQ ID NO: 124 - protein, 281 aa, With no toxin genes
  misc_feature: SGI Peptide ID NO. AGRMET1T143415
  misc_feature (207)..(273): Pfam Id: PF03318 Pfam Desc: Clostridium epsilon toxin ETX/Bacillus mosquitocidal toxin MTX2
  misc_feature: Useful for conferring pesticidal activity to an organism
  misc_feature: Useful for controlling a pest organism
MILFFILIYGGIAMKLKVLATTGLALSIGFTSLGVLEKPTFADETKENIVVSQSNSIKGYLYKNGIRTPVFESSKAKSIGAVEFPELPSNPSVGVPKEGKAVENLGSMGNILYFEGDAPDIVGSISGAGSIILGNISGKKLKYYLEKRADGTIVIGGYDPDTLRLYPLNVPNLAIKPHTAFDNNTKLKRETKYELITSDIMDNAVAYSFDKSITHGVSTTGTVGLAVTIGAKVSTEVGGGIIPGKVSAELSTSLTTSFSFGITITDEETIARHFSVEKVNN

SEQ ID NO: 125 - DNA, 2199 bp, Bacillus sp.
  misc_feature: SGI cDNA ID NO. AGRMET1G218713
  misc_feature: Encodes the peptide sequence at SEQ ID NO. 126
  misc_feature: Useful for conferring pesticidal activity to an organism
  misc_feature: Useful for controlling a pest organism
atgaagaaattaaaaccaacgcttagtgtagtagggagtttaacaatggctttaacactagcttcacctgcattagcagaaacaagtcttccaacagaaggaagcaaagttgaagtatttaaagaagatgcaaatgcaaaagaaggaaaaaatcctgtttatgatactaatgataaaataggaaagttgatgacagaaaacattgatgttcaaaataatgattgggataacgatggtatctcaaacgatttggagaagaatggttataaaattgagtttaatcgaaaaaccggaaaaaacgaagcactagcatgggatcccgagaaggataaaggaaagctcaaatttatttcaaatcctatgagtgcaaattcagatggagatccttttacagacatgtatgaagttgagaattataacaataattctgatacggactttaaccctatagttgctaatataccaaatctacaaattggtttgaaacgaatcgaagtaatccctattgcaaccattacggataataacggtggatcgatcagcagaggatgggaaaaaagtgtagccacacaacattcatttaatgtaggcctaactggtaccggtggtgtagaaggctcagcagccggtcctgttccttccggaagtgtttcagcaaatgtgggatacggatattcaaaaacaactactgaaacggagagttatacaaataattttgattggtctaccgcaacaactgtggatacagcgaaagcagcaaaagtacgcgtacacctggaatataaaaatgtaggtacctcatctgctgaaaatgtatcaccgcattttaatattcgtttaggaaataaaattattaatactgtaaaagcaacacaagatcgttataaggcaaactacctaagtactgaaaaaggtggacgaaataaaacagaagtagtcatcgacagtttagagggacaagcagatgtgaatattttcttatcgttagatgaattaaaagccgttgaacaaggggagcttctggcgattgaagtgttaccaacaagtacaatggatgtatctatcgagaaagatggagaattcatgaatttaggagattcaggaaaatatgaatctagagtaaatgcaactacagaggaattagaaacagacattggaaataagcctaagtttagagtatatactccaaagggatctcgcggtgagtatccagctttatcatacaacgaagtgtttaaacatgtaaatatagatacaaataaagtaaataatattgtgagcaagtatacaagaaataattctatagaagttgtttcatcttccaacgcagctagttatggtactacattggaaaattataaaaataatgagaatgtgggtttatatactaacaataaacacggggctttcgaaaacttacagccaccaaaattagaagaaagtagttatgatcctattacaaaaaagattcgtgcaacaatctcacctggtttatttggagcaaaaaatgaaatctccgcttcctatgaaactagacaaggttctacccaaaaagtaacactagttagaagtgggaatggacacatatatgagtctagagaaaatgtaccatttggtgaatttttaccgtcaaataaggttacatttgaagtccaggattcacaaaataaattacctacaaacaagatttctaccgttgttaaatataatgctgaatttaataattatgtagtagataattcaggtgaatttgttgtagagggagcttcttatactatagcagataataatgcagacaaatataaaagatattgggggagtcatcatgccagcaataaatgggaatatcttcagagtgaactttctagctctgaaaaagtgaatctagttattgaaagagtagggcagcctaaacccggacaaccgatcaaaaaagatgaagaggtattaattaaattcgcaaatcctatttattcagattatgtctatttaaaacttcaggatggttatattcatttagaccaaaaacgaaatgcaagtacttttaaatttaattctgcatttgatggtccaacatactatacactgtttaaaatacaatctaatggtaactatatacagcgggaatatgacaataattatatgaaatacggtactggtaatgggaataatatatggaatctaacaagagctcagtaa

SEQ ID NO: 126 - protein, 732 aa, Bacillus sp.
  misc_feature: SGI Peptide ID NO. AGRMET1T218713
  misc_feature (73)..(414): Pfam Id: PF03495 Pfam Desc: Clostridial binary toxin B/anthrax toxin PA
  misc_feature (64)..(290): NCBI GI: 150261179 Blast Desc: Vip1A(BR) [Bacillus thuringiensis]
  misc_feature (64)..(290): NCBI GI: 338222869 Blast Desc: vip1 protein [Bacillus thuringiensis]
  misc_feature (74)..(399): NCBI GI: 338815012 Blast Desc: iota toxin component Ib [Clostridium perfringens] gi|338160398|dbj|BAK40944.1| iota toxin component Ib [Clostridium perfringens]
  misc_feature (39)..(397): NCBI GI: 330368244 Blast Desc: CdtB [Clostridium difficile] gi|330368248|gb|AEC11567.1| CdtB [Clostridium difficile]
  misc_feature (85)..(388): NCBI GI: 322383481 Blast Desc: PL1_2748 [Paenibacillus larvae subsp. larvae B-3650] gi|321152229|gb|EFX45058.1| PL1_2748 [Paenibacillus larvae subsp. larvae B-3650]
  misc_feature (39)..(397): NCBI GI: 330368252 Blast Desc: CdtB [Clostridium difficile]
  misc_feature (39)..(397): NCBI GI: 255656585 Blast Desc: C2 toxin,component II [Clostridium difficile QCD-23m63] gi|296449962|ref|ZP_06891726.1| iota toxin component Ib [Clostridium difficile NAP08] gi|296878343|ref|ZP_06902351.1|
  misc_feature (39)..(397): NCBI GI: 330368260 Blast Desc: CdtB [Clostridium difficile]
  misc_feature (39)..(397): NCBI GI: 330368236 Blast Desc: CdtB [Clostridium difficile]
  misc_feature (39)..(397): NCBI GI: 330368240 Blast Desc: CdtB [Clostridium difficile]
  misc_feature: Useful for conferring pesticidal activity to an organism
  misc_feature: Useful for controlling a pest organism
MKKLKPTLSVVGSLTMALTLASPALAETSLPTEGSKVEVFKEDANAKEGKNPVYDTNDKIGKLMTENIDVQNNDWDNDGISNDLEKNGYKIEFNRKTGKNEALAWDPEKDKGKLKFISNPMSANSDGDPFTDMYEVENYNNNSDTDFNPIVANIPNLQIGLKRIEVIPIATITDNNGGSISRGWEKSVATQHSFNVGLTGTGGVEGSAAGPVPSGSVSANVGYGYSKTTTETESYTNNFDWSTATTVDTAKAAKVRVHLEYKNVGTSSAENVSPHFNIRLGNKIINTVKATQDRYKANYLSTEKGGRNKTEVVIDSLEGQADVNIFLSLDELKAVEQGELLAIEVLPTSTMDVSIEKDGEFMNLGDSGKYESRVNATTEELETDIGNKPKFRVYTPKGSRGEYPALSYNEVFKHVNIDTNKVNNIVSKYTRNNSIEVVSSSNAASYGTTLENYKNNENVGLYTNNKHGAFENLQPPKLEESSYDPITKKIRATISPGLFGAKNEISASYETRQGSTQKVTLVRSGNGHIYESRENVPFGEFLPSNKVTFEVQDSQNKLPTNKISTVVKYNAEFNNYVVDNSGEFVVEGASYTIADNNADKYKRYWGSHHASNKWEYLQSELSSSEKVNLVIERVGQPKPGQPIKKDEEVLIKFANPIYSDYVYLKLQDGYIHLDQKRNASTFKFNSAFDGPTYYTLFKIQSNGNYIQREYDNNYMKYGTGNGNNIWNLTRAQ

SEQ ID NO: 127 - DNA, 2310 bp, Bacillus sp.
  misc_feature: SGI cDNA ID NO. AGRMET1G218461
  misc_feature: Encodes the peptide sequence at SEQ ID NO. 128
  misc_feature: Useful for conferring pesticidal activity to an organism
  misc_feature: Useful for controlling a pest organism
atgaaacaattgaagccagcaattagtgtattaggtagtttaactatggcactaacgataacatcccctactttagctgaaacaaagcccgaacaagacgggaaagtggaaacctttaaagaagacaccaatataaaggagggacagaatattatctatggtgattctggaaaaaagggaatcatgattatggaagaaccccaggaaaataatgattgggacgaggatggtattcctaatattgtagaagaaaaaggatttaaaattgtatttaatgaaaagacagggaaaaatgaagcccagttatatgacctggtaaaagactttgggaaaaagagatttataacaaatcctaggagtgcaaactcagatggagacccttttacagatagctatgaagtggaacattatgacagtgattctgatacagattttaaccctatgatcgcgaatgtaccaaatctacaaattgctgtaaaacgtatcgatattactccagtggctagtattacagattcaaatggtgaatcgcgtactaaaagttgggaaaaaagtttatctgtacaacattcttttaatgttgggttaggggttgaaggtggcgccgaaggatcggcagtgggtcctgtcccttcaggaaaaggatcgttaaatgtaggatatggttactctaatacaaaaacggaaacagaaagcatctctaatagttttgattggtcaacagcaacaactgttgattcagctaaggctgcaaatgtgcgcttccacctagaatataaaaacacgggtactgcatctgctggggatgtttcacctcactttaacattcgattagggaataaaattatcaatactgtaaaggcaacacaagaccgttataaagcaaacttgttaactacagaaaaagggggaaataataaaactgaaattctaatggacagtgtagaaggtcaggcggatgtgaaaattcccctaacactggatgaattaaaagcagtagaacaaggggcacctctttctattgaagtcttgcctactagtacgatgaatgtgtatacaatgaaagatggaaagtttgaaaatttaggagattggtcgcattttgcatcaaatgtaaatgcttctactacattagtagaaacaaactacggttctataccaaaatatagagtctatacaccaagaacgggtaaggaaaagcctgctaatattgagcataatctttcactagacgaactctttgcacatactgggatagctgataaaggttgggtagcgaactatgtagtaaatggtcgcttaaacgaagaacgagttcgttatggtccaagtcggactcttttagaacgaggtaagaaccttggtctttttgataatcgtgcactacgaccaactctatcatatagcagttatgattatagcaagaaaaagatttatgcttcggttataccaggtatatttaatttgagtgaagaaatttatgttacgattcgtaatataaaaggtgagagccaaaaggtaacattagttcgaaatcagaaatcaaatgtgtatgaatccaaggaaaatgagcctgtagagttagcggttaatcgtgtatctcttggagaatctcaagctaagtttgaattaattgatgtaagagacaataaaactgaagtcttcacacctcttgtttcaaataaaagctatctagacgctatcgataaaatagtagtagataattccggagaacctatagtagaaggaaaacagtattatttgaagtcagctgttaatttctataacggtgtaaaagaatcttggagcgctggtaccttaagtcaatcaattaatgggagatatgtacacttttcacttaaggggaataattgggatgggttaagactcggtcctatccaacaagcaatacacggaccagacattcaggcaacaccagtaatacttgaaagaaaaggtaaatctagaccaggagaaccattcaaaaaagatgaggaagtgtttatgaagtttacgaatagtagtcatggtaattaccagtatttaaacattggaaatggttatgactatagttggttagatactgaaaataataaatctgctattaaattagacaagcttcctaatcagaagagtttctatctaaaatctgattctacttatataacatctagagaaaatcagtggactagttctgttgcagataatggtatcgccccgcttgtgggtgctggtgaacgtattttaaaatctgaacatacaacttcaccaggaaataatcataaatgggagttagaaagtattaaataa

SEQ ID NO: 128 - protein, 769 aa, Bacillus sp.
  misc_feature: SGI Peptide ID NO. AGRMET1T218461
  misc_feature (71)..(382): Pfam Id: PF03495 Pfam Desc: Clostridial binary toxin B/anthrax toxin PA
  misc_feature (64)..(384): NCBI GI: 57283997 Blast Desc: Isp1b protein [Brevibacillus laterosporus]
  misc_feature (69)..(419): NCBI GI: 150261179 Blast Desc: Vip1A(BR) [Bacillus thuringiensis]
  misc_feature (69)..(419): NCBI GI: 338222869 Blast Desc: vip1 protein [Bacillus thuringiensis]
  misc_feature (69)..(384): NCBI GI: 57208131 Blast Desc: Isp1a protein [Brevibacillus laterosporus]
  misc_feature (78)..(391): NCBI GI: 228976758 Blast Desc: bthur0003_64120 [Bacillus thuringiensis serovar thuringiensis str. T01001] gi|228782971|gb|EEM31133.1| bthur0003_64120 [Bacillus thuringiensis serovar thuringiensis
  misc_feature (78)..(391): NCBI GI: 228942851 Blast Desc: bthur0008_54660 [Bacillus thuringiensis serovar berliner ATCC 10792] gi|228816807|gb|EEM62915.1| bthur0008_54660 [Bacillus thuringiensis serovar berliner ATCC 10792]
  misc_feature (69)..(385): NCBI GI: 168206011 Blast Desc: iota toxin component Ib [Clostridium perfringens E str. JGS1987] gi|414655|emb|CAA51960.1| iota toxin component Ib [Clostridium perfringens] gi|170662542|gb|EDT15225.1| iota toxin
  misc_feature (69)..(374): NCBI GI: 330368252 Blast Desc: CdtB [Clostridium difficile]
  misc_feature (69)..(374): NCBI GI: 330368236 Blast Desc: CdtB [Clostridium difficile]
  misc_feature (69)..(374): NCBI GI: 8926248 Blast Desc: AF271719_2 CdtB [Clostridium difficile] gi|330368264|gb|AEC11579.1| CdtB [Clostridium difficile]
  misc_feature: Useful for conferring pesticidal activity to an organism
  misc_feature: Useful for controlling a pest organism
MKQLKPAISVLGSLTMALTITSPTLAETKPEQDGKVETFKEDTNIKEGQNIIYGDSGKKGIMIMEEPQENNDWDEDGIPNIVEEKGFKIVFNEKTGKNEAQLYDLVKDFGKKRFITNPRSANSDGDPFTDSYEVEHYDSDSDTDFNPMIANVPNLQIAVKRIDITPVASITDSNGESRTKSWEKSLSVQHSFNVGLGVEGGAEGSAVGPVPSGKGSLNVGYGYSNTKTETESISNSFDWSTATTVDSAKAANVRFHLEYKNTGTASAGDVSPHFNIRLGNKIINTVKATQDRYKANLLTTEKGGNNKTEILMDSVEGQADVKIPLTLDELKAVEQGAPLSIEVLPTSTMNVYTMKDGKFENLGDWSHFASNVNASTTLVETNYGSIPKYRVYTPRTGKEKPANIEHNLSLDELFAHTGIADKGWVANYVVNGRLNEERVRYGPSRTLLERGKNLGLFDNRALRPTLSYSSYDYSKKKIYASVIPGIFNLSEEIYVTIRNIKGESQKVTLVRNQKSNVYESKENEPVELAVNRVSLGESQAKFELIDVRDNKTEVFTPLVSNKSYLDAIDKIVVDNSGEPIVEGKQYYLKSAVNFYNGVKESWSAGTLSQSINGRYVHFSLKGNNWDGLRLGPIQQAIHGPDIQATPVILERKGKSRPGEPFKKDEEVFMKFTNSSHGNYQYLNIGNGYDYSWLDTENNKSAIKLDKLPNQKSFYLKSDSTYITSRENQWTSSVADNGIAPLVGAGERILKSEHTTSPGNNHKWELESIK

SEQ ID NO: 129 - DNA, 2838 bp, Bacillus sp.
  misc_feature: SGI cDNA ID NO. AGRMET1G218332
  misc_feature: Encodes the peptide sequence at SEQ ID NO. 130
  misc_feature: Useful for conferring pesticidal activity to an organism
  misc_feature: Useful for controlling a pest organism
gtggaaaggaatgattatatgcaattaaaaaatgtttacaaatgtttaacaattacagcccttatagcacagattgctgtatttccaagttcatctgtggcagaagaagcaaaaacaaagaaatcaagtacaccaaaaacagaaaaacagcaaaaagacaagcaagctgatgtagggctagtcggatattattttattaataatcaattcaatgaaagcgccttcgtacaaaccggtgaaaaaggaaaattactagatgcgaaaaaagtaaaacaagatacatctcaaattaaatctattcgatgggaagggaatattaagccttctaaaacaggtgaatatatactatctacctcttcaaacaagcatgtaacaatgaaaattaatggggaaacagtaatccaacaagctgatatggaaaaggctatgaagctcgaaaaggaaaagaattactctattacaattgaatatcttgttccagagagtggaaaagaattacaacttttttgggaaatgagtggggaagaaaaagttcaaattccagataataatatattgtccccaaatttttcagaaacaatcgaactacaaagtagatctggtcaacaaccagcaacatcaggagattttgatggtgatggtatctctgattctttagaagaaaacggatatacatttaaagatgctgctattgttccttggaaggatgaatatgcttcacaaggatataaaaaatacacgtctaattcaagaaaagcaaagacctccgcagacccttatactgactttgaaaaagtaatcggtagaatgccagaggctacaaaaagagaagctagagatccacttgttgcggcatatccatctgtcggtgtcgggatggagaaattccatttttctaaaaatgaaaatgtacaagaaggagcttctggtaccaaaacaaaaacagtcacagatacgagtacaaccactcatagtgtggatattggaggatcgattggctggggagataaggggccttcgtttacgttttctcctaagtatacccattcttggagtaacagtacctccgttgccgattcggaaagtgacacttggtcttcccaaatcgggaccaatccatccgaagctgcatatttgaatgcaaatgtacgttattacaacggaggaaatgctcctatttatgatttaagacccacttcaaactttgtattacaaaattcaagtgagtcaattgcaactatcacagcaaatgccaataccattggaaatagcttaggacctagcgctacgtatccagcgaagggacaagcacccatttctttaacacaagcaaatgaggcaggtaccatcaaaattagtgtgaattcagaaacccttgacaaaattcaagagggaacagagacacttaatattgaaacgacacaaaatagaggactatatggaaaaatagatgaaggaggaaaccaaatacctggaggggaatgggatcccatccgaacgaatattgatgcaatttctggggctttaacactaaacctaggacccgcaaaagaaagtttagaacgccgcgttgccgcaaaagatttgcgagacccagaagataaaacgccagaaatcacaataaaagaggcaataaaaaaagcatttgatgcagaagaagtaggcggtagattaatatacaaggatgccaatggaaaagacattgtattagatgaatcggcggtaaatgttgttacagatgaaaatacgaaaaaagaaattgacgcacaactcgcaaatatgccagacaaaaaggtttacgatgtaaaatggaaacgtgggatgaagatgacacttcatgtaccggaaaaatattttgatttcgaaaaatcagatactggattttactacacttatggagaatctggaggatatactggaagcaaaagaggacgtattaatgctggagggaatggatactcaaaggaaaatctacagttaaaaccatatacatcatatacagctcgtgcctatgtaaaatcagatagttctaatggattatcagatgttatattttatgtagataataaccaaggggaaggaaatggtgcaaaagtaaacggaaaagtgaacggtcaacaatggcaacagattgagttttcatttaatacgggagcaaacccagagtatttttctaatatcggatttaaaaataatggaaatgcacaattacattttgatgaagtatccgttactgaatggacggaaacagaaaatattcagaaagcacatgtatttgatacttttattgcccagtatgatatctttagcagcaacatagaaggaataaaattttcaaaaacttctcatacaaaagtaaggtatcaactatttttaaataatacttggaaggaaattcgatctgatgtgttaaatgaggacggaaccatagatttgactaagtggaatggtggaaatggcctaccggcacatcaatcttcttttgttttatatgctgtggatgaaaaaaatgataatttgaaagtgaaagtagcggaacgttatccattagcatatgagcatggatatcaatcttggaaccaagacggtaattatatgaacggcattttcttcaaagctcccgatagcaaggtaagatatcaaattgctatcgataaccaaccgacagtaattcttccagggtatccgttaaaccctcagggggttagatatatcaatttcttagattttaatgctggaaaggggattcctctcaacaagcaaatacgtgtatttgttgtagatgagaagaatgacaatttacgcgaacaaatcgctttccgtagtgcaactgattaa

SEQ ID NO: 130 - protein, 945 aa, Bacillus sp.
  misc_feature: SGI Peptide ID NO. AGRMET1T218332
  misc_feature (209)..(614): Pfam Id: PF03495 Pfam Desc: Clostridial binary toxin B/anthrax toxin PA
  misc_feature (59)..(183): Pfam Id: PF07691 Pfam Desc: PA14 domain
  misc_feature (865)..(938): Pfam Id: PF09259 Pfam Desc: Fungal immunomodulatory protein Fve
  misc_feature (7)..(927): NCBI GI: 228949414 Blast Desc: Iota toxin component Ib [Bacillus thuringiensis serovar monterrey BGSC 4AJ1] gi|228810267|gb|EEM56627.1| Iota toxin component Ib [Bacillus thuringiensis serovar monterrey BGSC
  misc_feature (7)..(848): NCBI GI: 196048174 Blast Desc: iota toxin component Ib [Bacillus cereus 03BB108] gi|196020911|gb|EDX59641.1| iota toxin component Ib [Bacillus cereus 03BB108]
  misc_feature (7)..(753): NCBI GI: 330368244 Blast Desc: CdtB [Clostridium difficile] gi|330368248|gb|AEC11567.1| CdtB [Clostridium difficile]
  misc_feature (7)..(753): NCBI GI: 330368236 Blast Desc: CdtB [Clostridium difficile]
  misc_feature (7)..(753): NCBI GI: 8926248 Blast Desc: AF271719_2 CdtB [Clostridium difficile] gi|330368264|gb|AEC11579.1| CdtB [Clostridium difficile]
  misc_feature (7)..(755): NCBI GI: 168206011 Blast Desc: iota toxin component Ib [Clostridium perfringens E str. JGS1987] gi|414655|emb|CAA51960.1| iota toxin component Ib [Clostridium perfringens] gi|170662542|gb|EDT15225.1| iota toxin
  misc_feature (7)..(753): NCBI GI: 330368240 Blast Desc: CdtB [Clostridium difficile]
  misc_feature (7)..(753): NCBI GI: 254976197 Blast Desc: C2 toxin,component II [Clostridium difficile QCD-66c26] gi|255093586|ref|ZP_05323064.1| C2 toxin,component II [Clostridium difficile CIP 107932] C2 toxin,component II C2 II C2
  misc_feature (7)..(753): NCBI GI: 2340082 Blast Desc: ADP-ribosyltransferase binding component [Clostridium difficile CD196]
  misc_feature (7)..(753): NCBI GI: 330368260 Blast Desc: CdtB [Clostridium difficile]
  misc_feature: Useful for conferring pesticidal activity to an organism
  misc_feature: Useful for controlling a pest organism
MERNDYMQLKNVYKCLTITALIAQIAVFPSSSVAEEAKTKKSSTPKTEKQQKDKQADVGLVGYYFINNQFNESAFVQTGEKGKLLDAKKVKQDTSQIKSIRWEGNIKPSKTGEYILSTSSNKHVTMKINGETVIQQADMEKAMKLEKEKNYSITIEYLVPESGKELQLFWEMSGEEKVQIPDNNILSPNFSETIELQSRSGQQPATSGDFDGDGISDSLEENGYTFKDAAIVPWKDEYASQGYKKYTSNSRKAKTSADPYTDFEKVIGRMPEATKREARDPLVAAYPSVGVGMEKFHFSKNENVQEGASGTKTKTVTDTSTTTHSVDIGGSIGWGDKGPSFTFSPKYTHSWSNSTSVADSESDTWSSQIGTNPSEAAYLNANVRYYNGGNAPIYDLRPTSNFVLQNSSESIATITANANTIGNSLGPSATYPAKGQAPISLTQANEAGTIKISVNSETLDKIQEGTETLNIETTQNRGLYGKIDEGGNQIPGGEWDPIRTNIDAISGALTLNLGPAKESLERRVAAKDLRDPEDKTPEITIKEAIKKAFDAEEVGGRLIYKDANGKDIVLDESAVNVVTDENTKKEIDAQLANMPDKKVYDVKWKRGMKMTLHVPEKYFDFEKSDTGFYYTYGESGGYTGSKRGRINAGGNGYSKENLQLKPYTSYTARAYVKSDSSNGLSDVIFYVDNNQGEGNGAKVNGKVNGQQWQQIEFSFNTGANPEYFSNIGFKNNGNAQLHFDEVSVTEWTETENIQKAHVFDTFIAQYDIFSSNIEGIKFSKTSHTKVRYQLFLNNTWKEIRSDVLNEDGTIDLTKWNGGNGLPAHQSSFVLYAVDEKNDNLKVKVAERYPLAYEHGYQSWNQDGNYMNGIFFKAPDSKVRYQIAIDNQPTVILPGYPLNPQGVRYINFLDFNAGKGIPLNKQIRVFVVDEKNDNLREQIAFRSATD

SEQ ID NO: 131 - DNA, 1030 bp, Bacillus sp.
  misc_feature: SGI cDNA ID NO. AGRMET1G218708
  misc_feature: Encodes the peptide sequence at SEQ ID NO. 132
  misc_feature: Useful for conferring pesticidal activity to an organism
  misc_feature: Useful for controlling a pest organism
atgagtaagaaaccgaaaaatttattaaaatgtctttcagcagctgcaattttatctcaaatttcaatgaatccaattgcttctcacgcagaagtcaattcagctaaagattcggtctcacaagaaaatatagcaaggaacggtttggtcgcatattatttcaaagattcatcttacaaagaattatcatccattcaggttgcgaaagatagtacattattcaaaaaacaagaaataaaaactaatcaacaacctgttcaatctattcggttaataggtaaaattaagcctacacaaaatggagaatatgccttttcaatttcatcaaatgatgcaaatacaattatacaaatcaatggtcaaacagtgcttcaagaaggtaaaaagaatccacctattcatttagagaaaaataaaaactatgatataaaaatagaatatagaagtaaacaagaggtcaattccaatatacaattattttggtcaaaagatggtgaaaaaaaggaacttattccgcaaaatcaacttttattacctgatttctcagcacaagaaaaagtaatagatgagcaatcacatacactgttacttccaaaacacaacctgtttaattctgcttcagattctgggctagcagacacagacaaagatggaatacctgatgagtgggaagctacaggatatacgtttaaagatcaacaaattgtaaaatgggacgatgcttttcttacccaaggatataaaaaatatctttcaaatccgaataaaatccgaacagttgtcgatccatatacggatttcgaaaaagtaataggttatatgccagctgctacaaaagatgaagcaagagatcctatggtagcagcttatccagcagtgggtgttggaatggaaaaattctttttctccaaaaatgaaaatgtttcggatgggactagtggaacaatttcaaaaagtgttactgatacaaactctacaaccaatggggtagatgtttcagcagagttgggatggagtaaaggatggagtt

SEQ ID NO: 132 - protein, 343 aa, Bacillus sp.
  misc_feature: SGI Peptide ID NO. AGRMET1T218708
  misc_feature (212)..(339): Pfam Id: PF03495 Pfam Desc: Clostridial binary toxin B/anthrax toxin PA
  misc_feature (46)..(174): Pfam Id: PF07691 Pfam Desc: PA14 domain
  misc_feature (4)..(339): NCBI GI: 228949414 Blast Desc: Iota toxin component Ib [Bacillus thuringiensis serovar monterrey BGSC 4AJ1] gi|228810267|gb|EEM56627.1| Iota toxin component Ib [Bacillus thuringiensis serovar monterrey BGSC
  misc_feature (6)..(343): NCBI GI: 196048174 Blast Desc: iota toxin component Ib [Bacillus cereus 03BB108] gi|196020911|gb|EDX59641.1| iota toxin component Ib [Bacillus cereus 03BB108]
  misc_feature (6)..(343): NCBI GI: 330368244 Blast Desc: CdtB [Clostridium difficile] gi|330368248|gb|AEC11567.1| CdtB [Clostridium difficile]
  misc_feature (6)..(343): NCBI GI: 330368240 Blast Desc: CdtB [Clostridium difficile]
  misc_feature (6)..(343): NCBI GI: 254976197 Blast Desc: C2 toxin,component II [Clostridium difficile QCD-66c26] gi|255093586|ref|ZP_05323064.1| C2 toxin,component II [Clostridium difficile CIP 107932] C2 toxin,component II C2 II C2
  misc_feature (6)..(343): NCBI GI: 8926248 Blast Desc: AF271719_2 CdtB [Clostridium difficile] gi|330368264|gb|AEC11579.1| CdtB [Clostridium difficile]
  misc_feature (6)..(343): NCBI GI: 330368236 Blast Desc: CdtB [Clostridium difficile]
  misc_feature (6)..(343): NCBI GI: 2340082 Blast Desc: ADP-ribosyltransferase binding component [Clostridium difficile CD196]
  misc_feature (6)..(343): NCBI GI: 330368260 Blast Desc: CdtB [Clostridium difficile]
  misc_feature (4)..(343): NCBI GI: 255656585 Blast Desc: C2 toxin,component II [Clostridium difficile QCD-23m63] gi|296449962|ref|ZP_06891726.1| iota toxin component Ib [Clostridium difficile NAP08] gi|296878343|ref|ZP_06902351.1|
  misc_feature: Useful for conferring pesticidal activity to an organism
  misc_feature: Useful for controlling a pest organism
MSKKPKNLLKCLSAAAILSQISMNPIASHAEVNSAKDSVSQENIARNGLVAYYFKDSSYKELSSIQVAKDSTLFKKQEIKTNQQPVQSIRLIGKIKPTQNGEYAFSISSNDANTIIQINGQTVLQEGKKNPPIHLEKNKNYDIKIEYRSKQEVNSNIQLFWSKDGEKKELIPQNQLLLPDFSAQEKVIDEQSHTLLLPKHNLFNSASDSGLADTDKDGIPDEWEATGYTFKDQQIVKWDDAFLTQGYKKYLSNPNKIRTVVDPYTDFEKVIGYMPAATKDEARDPMVAAYPAVGVGMEKFFFSKNENVSDGTSGTISKSVTDTNSTTNGVDVSAELGWSKGWS

SEQ ID NO: 133 - DNA, 2931 bp, Bacillus sp.
  misc_feature: SGI cDNA ID NO. AGRMET1G219045
  misc_feature: Encodes the peptide sequence at SEQ ID NO. 134
  misc_feature: Useful for conferring pesticidal activity to an organism
  misc_feature: Useful for controlling a pest organism
atgaaaataaagaatttacagaaatatatgatttttattatgctgcttgcacagtttactttgccaccatcagcatcttatgcagaaatagaaaaaagggaaggtaataacgctgaaacagaatggacttctgtagataatcctggaaaaggtttattaggttattactttcaagataataaatttagcgatttaactgccatacaaccatatacatctggaggtttaatcttaaataacaagataagtgagacactctctaatgaaggtaagcatattcaatcggcaagatggctggggtatattaaaccttctaaaacggaggaatatcaattatctacctcagctgatcaaaatgtcattatccaattggacggtcgaatcattataaatcgagtccctatggaacagcgaataaagttagaaaaagataagttatacgaaataaaaatagagtatcaaggagattctaattcattattagatttaaagtttttttggtccacttcagatgtggagaaggaactaatacctgatgaaaacctgcgtacgcctaatttctctgaaaaaacagcgcttcccgaggaaagtaatttaattccagaaaataatctatttgaaagggaaaaagtatccagtcgaagcaaaagaaattccacacctcagttgcaagatatagataaagatggtattccggatgaatgggaattaaatggatacacaataaggcatgggattttaacaacttggaaagatgattatagctccgaaggatataaaaaatatgtatcacatccttataattctcgaacagctgctgatccatatacggatctccaaaaagtatctgggaatatgccaacgtcaacaaagccagaagcaagagatccattggtagcagcttatccggctgttggtgttaaaatggaaaaattaattatatcaaaaaatgagaatgtgacggaaggctcacaaaatacaaaagctatagggacaacgaaaaccaaaaccaatgctaatactgtagaaattggtgggaaaatggggtggtctaataaaactggattaacttttgaatttacaccaaaatatgtacattcttggacaagcggcacggctgtgcaagaaacaaagggggaatcttggtcaaaacaaataggtattaacacagagcaagcggcattcttaaatgctaatgtaagatactataatgcaggaacagccccaatttatgatgtacgcccaactactaattttatattgagaaatgcaaagcaaactttaacgacaataaaagccgggccaaatcaaataggaaataacttacctccaggagagacatatccaaagaaggggcaaggcccaatttcactagatagggcaaatgcatttgggattatgaaaatttctatgaatgcagcgcaattagatagtcttcaatcacaaggagagtcaatagatttagaaacaacacagagtgggggccaatatggagtattagatccttcaacagggattttggttacagattcaggaaagcaatgggatcatatccttagtgatattgaagcaagttcagggtcattaattttagatataggtaaagaagttttagaacgaagagttgcagcaagagatgttaataacccagaagataagacacctataatcactgtgaaagaggcaataaaaaaagcatttggagcagttgaaagagagggtttgttgtactataaagagaaagaaatgaataaggaaattccactccatgaaagtgcaattaatattatagtagacgaaacaacaaaaaatgaatttaataagcaattagataaaatgcagaagaaaagtgtatatgatattacatttaagaggggtatgagcattacttttcatacaccaattatgtatgatgattttgaaaataagaataatagttctttaggatggagcgacgttgagtttggggattccggacattctggcaagtcttcagtaaatattggagtgaattcagtcaattattctcaacgattggagagggtgaatttaaaaccctatacaatgtacacacttcgtgcttgggtgaaaggaacaccttatagtttagatggcaaagtaagtaatcactccttttctattcatctaaattcgggggatacaagtagtgaaggattaaacgaaagattagaattaaacggtactgaatggcaattattcgaatttacttttgatacacaaaatcgcccggatgattttacatttataggtattaaaaatacgggatcgaacgttcgactttctgttgatgatttatctatatccgaatggggtccatcagaaatttggctacgtaatcatgttctttcacattggcatacgccgaaaccaggatatgtagacggaataacattctctaaagttccgaatacaaaattacgctatcaactagagattgatggaaaatttactgacattaaatctgtatctcaggtagattctcaaggaacacaatatattgacttcaaagattttaataatgggaaaagtattgacacgggaagctatatagctgtgtatgcggtgtatgggaaaaatgaaagtcaaagagtaaaagtagctgaacatggggatcgagatatcatgaatcagcttcgactgcgacctttagttgttacctacttttacaaattggttcaaaacagctatacatttgaaattaaaactggagaaaatgcgcccaatgcagtatataaagtttggaatgtaacaaaaaatattacttattatttggggcatagaggaagtaaaacaagtacttggattgacaatgtcccatactaccctaaagatgaatatgcagtagtcgcagtaatggatggaaaagagtacgttgtatttaaagatattgggaaaaatatatatagataa

SEQ ID NO: 134 - protein, 976 aa, Bacillus sp.
  misc_feature: SGI Peptide ID NO. AGRMET1T219045
  misc_feature (224)..(637): Pfam Id: PF03495 Pfam Desc: Clostridial binary toxin B/anthrax toxin PA
  misc_feature (50)..(180): Pfam Id: PF07691 Pfam Desc: PA14 domain
  misc_feature (797)..(865): Pfam Id: PF09259 Pfam Desc: Fungal immunomodulatory protein Fve
  misc_feature (1)..(888): NCBI GI: 228949414 Blast Desc: Iota toxin component Ib [Bacillus thuringiensis serovar monterrey BGSC 4AJ1] gi|228810267|gb|EEM56627.1| Iota toxin component Ib [Bacillus thuringiensis serovar monterrey BGSC
  misc_feature (1)..(888): NCBI GI: 196048174 Blast Desc: iota toxin component Ib [Bacillus cereus 03BB108] gi|196020911|gb|EDX59641.1| iota toxin component Ib [Bacillus cereus 03BB108]
  misc_feature (1)..(871): NCBI GI: 2117115 Blast Desc: Sb component [Clostridium spiroforme]
  misc_feature (1)..(862): NCBI GI: 168206011 Blast Desc: iota toxin component Ib [Clostridium perfringens E str. JGS1987] gi|414655|emb|CAA51960.1| iota toxin component Ib [Clostridium perfringens] gi|170662542|gb|EDT15225.1| iota toxin
  misc_feature (1)..(862): NCBI GI: 338815012 Blast Desc: iota toxin component Ib [Clostridium perfringens] gi|338160398|dbj|BAK40944.1| iota toxin component Ib [Clostridium perfringens]
  misc_feature (1)..(697): NCBI GI: 330368244 Blast Desc: CdtB [Clostridium difficile] gi|330368248|gb|AEC11567.1| CdtB [Clostridium difficile]
  misc_feature (1)..(697): NCBI GI: 8926248 Blast Desc: AF271719_2 CdtB [Clostridium difficile] gi|330368264|gb|AEC11579.1| CdtB [Clostridium difficile]
  misc_feature (1)..(862): NCBI GI: 330368260 Blast Desc: CdtB [Clostridium difficile]
  misc_feature (1)..(697): NCBI GI: 330368236 Blast Desc: CdtB [Clostridium difficile]
  misc_feature (1)..(697): NCBI GI: 2340082 Blast Desc: ADP-ribosyltransferase binding component [Clostridium difficile CD196]
  misc_feature: Useful for conferring pesticidal activity to an organism
  misc_feature: Useful for controlling a pest organism
MKIKNLQKYMIFIMLLAQFTLPPSASYAEIEKREGNNAETEWTSVDNPGKGLLGYYFQDNKFSDLTAIQPYTSGGLILNNKISETLSNEGKHIQSARWLGYIKPSKTEEYQLSTSADQNVIIQLDGRIIINRVPMEQRIKLEKDKLYEIKIEYQGDSNSLLDLKFFWSTSDVEKELIPDENLRTPNFSEKTALPEESNLIPENNLFEREKVSSRSKRNSTPQLQDIDKDGIPDEWELNGYTIRHGILTTWKDDYSSEGYKKYVSHPYNSRTAADPYTDLQKVSGNMPTSTKPEARDPLVAAYPAVGVKMEKLIISKNENVTEGSQNTKAIGTTKTKTNANTVEIGGKMGWSNKTGLTFEFTPKYVHSWTSGTAVQETKGESWSKQIGINTEQAAFLNANVRYYNAGTAPIYDVRPTTNFILRNAKQTLTTIKAGPNQIGNNLPPGETYPKKGQGPISLDRANAFGIMKISMNAAQLDSLQSQGESIDLETTQSGGQYGVLDPSTGILVTDSGKQWDHILSDIEASSGSLILDIGKEVLERRVAARDVNNPEDKTPIITVKEAIKKAFGAVEREGLLYYKEKEMNKEIPLHESAINIIVDETTKNEFNKQLDKMQKKSVYDITFKRGMSITFHTPIMYDDFENKNNSSLGWSDVEFGDSGHSGKSSVNIGVNSVNYSQRLERVNLKPYTMYTLRAWVKGTPYSLDGKVSNHSFSIHLNSGDTSSEGLNERLELNGTEWQLFEFTFDTQNRPDDFTFIGIKNTGSNVRLSVDDLSISEWGPSEIWLRNHVLSHWHTPKPGYVDGITFSKVPNTKLRYQLEIDGKFTDIKSVSQVDSQGTQYIDFKDFNNGKSIDTGSYIAVYAVYGKNESQRVKVAEHGDRDIMNQLRLRPLVVTYFYKLVQNSYTFEIKTGENAPNAVYKVWNVTKNITYYLGHRGSKTSTWIDNVPYYPKDEYAVVAVMDGKEYVVFKDIGKNIYR

SEQ ID NO: 135 - DNA, 2301 bp, Bacillus sp.
  misc_feature: SGI cDNA ID NO. AGRMET1G218600
  misc_feature: Encodes the peptide sequence at SEQ ID NO. 136
  misc_feature: Useful for conferring pesticidal activity to an organism
  misc_feature: Useful for controlling a pest organism
gtgattaacttgaattttaaaaaagtaggattaggtttagctactgtaacactgtttaatggtgtattaatggttcctcaaatttcatatgcagggacacaaaaatcaactatggaggtatccaaaacaaaacaggagaaaaaacaagatcctcagtatggtcttttggggtattactttcatgatgaagcatttaataatcctgcattaattgcttctggaacaggtgggcaattatcattaaagaaaaaagatataaatgatcttttagaacttaaggaacaaaagatacaatctgctagatggacggggtatattaagcctaccgaagatggtgaatatattttttctaccacagacgatgcacatgtaattatgcaggtggatggaaaaatagttattaatcaagcagcgatggaacaaaaaataaaactagaaaagggcaagttatataaaataaatatggaatacagttccaaagaggaaaatcattcggaaacattaatccccttacagctattttgggctatttcaaataaggagaaagttaatattccattacaaaatttgcttcctcccaattattctagtgaaggaagggacaagcatttaatttcagataagggtttatttgcatctaaaaaccctgaaatttatcaaaaagaaactagaaccccctcgttagacactgatgatgatggcatatgggatgtatgggaacgtaatggttatacggtaaaagatcatattgtggtcaagtggaaagatgaactggcggataaggggtataaaaaatatatttctaatccatttaaatcacatactagtggagatccctattcagatacggaaaaggttctgggggaaatagatgagacaataaataaaaatgcgagagatccattagtagcagcttatccaattgttggcgtggacatggaaaaaattattttatctaaaaatcaggatgcaacccatgaagaggggaagaatgtatctcattctacatcatcaagtaaaggaaattctgatgctgttggaggtagtgtcactgcaggttggaaaggaatgctggaagggtttggtgtagatgtttctgtaaattacgaacatacttggacaagtacaacgacagacgagaatagcgatggaaaaaattggagtgatagtttacatattaataaaggtgaagctgcatatttaaatgcaaatgtgagatattataacactggtacggcccctatgtatgatgtacagccaactactaatcttgttttaggcgatgaaacactagttacaatccaagcacaatctaatcaaataggaaacgcgctaattcctaattcaacatatccaagaaaagggcagcatgggttggcattaaatacattggatcaatttagttctagattaattcctgtgaattttaaccagcttactgaattagataatgggaataagctaagattagaaacaacgcaggtaagtggtaattttgcgataaggaatacagacggtagtctatctacttcagggaattcttggaatgtatatctacctcaaattgaagcggtaacaggtagtattacccttgacataggagatgaaacattagaaagaagaattgttgcaagggattctagtgaccctgaagatcaaacacctgaattaacaattggtgaggcacttataaggggatttggggtagttgaacatgatggtaaatattattacaaagatagagagattctaggaaatggatttgaattaacccttgataaatcaaccgcaactaacatagagaagcagctggaaaaatcgaatgataaatctttatttaatttgaaatgggaaagaggcatgaatatttccttaataactagaacttttataaatctacctgagcatgattctgacaattttgatgatccatcatggacaacggataataatgataaatgggtagattgggagggacgtgaaggttggctgattgacctgtctgataagggggttacaggaaaggcaatgatactgaagcctaatcattttatattatatggcggcgatgaaaataattttatttccgatggaatatggcttgttacttattacgcaaaagtagatggagataaggaacaaattttaggtcttaatgggcagataaataacacagtaacaaataattaccaaaaattccaaagtgttttaaatatgactaatgatcatattttggaatttaaaaataaaggaaatgaaaatattcttattgataatgtagagttacaaaaaatacgataa

SEQ ID NO: 136 - protein, 766 aa, Bacillus sp.
  misc_feature: SGI Peptide ID NO. AGRMET1T218600
  misc_feature (228)..(631): Pfam Id: PF03495 Pfam Desc: Clostridial binary toxin B/anthrax toxin PA
  misc_feature (53)..(186): Pfam Id: PF07691 Pfam Desc: PA14 domain
  misc_feature (2)..(643): NCBI GI: 330368244 Blast Desc: CdtB [Clostridium difficile] gi|330368248|gb|AEC11567.1| CdtB [Clostridium difficile]
  misc_feature (2)..(643): NCBI GI: 330368240 Blast Desc: CdtB [Clostridium difficile]
  misc_feature (2)..(643): NCBI GI: 2340082 Blast Desc: ADP-ribosyltransferase binding component [Clostridium difficile CD196]
  misc_feature (2)..(643): NCBI GI: 254976197 Blast Desc: C2 toxin,component II [Clostridium difficile QCD-66c26] gi|255093586|ref|ZP_05323064.1| C2 toxin,component II [Clostridium difficile CIP 107932] C2 toxin,component II C2 II C2
  misc_feature (2)..(643): NCBI GI: 8926248 Blast Desc: AF271719_2 CdtB [Clostridium difficile] gi|330368264|gb|AEC11579.1| CdtB [Clostridium difficile]
  misc_feature (2)..(643): NCBI GI: 330368236 Blast Desc: CdtB [Clostridium difficile]
  misc_feature (2)..(637): NCBI GI: 330368260 Blast Desc: CdtB [Clostridium difficile]
  misc_feature (54)..(643): NCBI GI: 255656585 Blast Desc: C2 toxin,component II [Clostridium difficile QCD-23m63] gi|296449962|ref|ZP_06891726.1| iota toxin component Ib [Clostridium difficile NAP08] gi|296878343|ref|ZP_06902351.1|
  misc_feature (2)..(643): NCBI GI: 330368252 Blast Desc: CdtB [Clostridium difficile]
  misc_feature (7)..(632): NCBI GI: 2117115 Blast Desc: Sb component [Clostridium spiroforme]
  misc_feature: Useful for conferring pesticidal activity to an organism
  misc_feature: Useful for controlling a pest organism
MINLNFKKVGLGLATVTLFNGVLMVPQISYAGTQKSTMEVSKTKQEKKQDPQYGLLGYYFHDEAFNNPALIASGTGGQLSLKKKDINDLLELKEQKIQSARWTGYIKPTEDGEYIFSTTDDAHVIMQVDGKIVINQAAMEQKIKLEKGKLYKINMEYSSKEENHSETLIPLQLFWAISNKEKVNIPLQNLLPPNYSSEGRDKHLISDKGLFASKNPEIYQKETRTPSLDTDDDGIWDVWERNGYTVKDHIVVKWKDELADKGYKKYISNPFKSHTSGDPYSDTEKVLGEIDETINKNARDPLVAAYPIVGVDMEKIILSKNQDATHEEGKNVSHSTSSSKGNSDAVGGSVTAGWKGMLEGFGVDVSVNYEHTWTSTTTDENSDGKNWSDSLHINKGEAAYLNANVRYYNTGTAPMYDVQPTTNLVLGDETLVTIQAQSNQIGNALIPNSTYPRKGQHGLALNTLDQFSSRLIPVNFNQLTELDNGNKLRLETTQVSGNFAIRNTDGSLSTSGNSWNVYLPQIEAVTGSITLDIGDETLERRIVARDSSDPEDQTPELTIGEALIRGFGVVEHDGKYYYKDREILGNGFELTLDKSTATNIEKQLEKSNDKSLFNLKWERGMNISLITRTFINLPEHDSDNFDDPSWTTDNNDKWVDWEGREGWLIDLSDKGVTGKAMILKPNHFILYGGDENNFISDGIWLVTYYAKVDGDKEQILGLNGQINNTVTNNYQKFQSVLNMTNDHILEFKNKGNENILIDNVELQKIR

SEQ ID NO: 137 - DNA, 2181 bp, Bacillus sp.
  misc_feature: SGI cDNA ID NO. AGRMET1G219032
  misc_feature: Encodes the peptide sequence at SEQ ID NO. 138
  misc_feature: Useful for conferring pesticidal activity to an organism
  misc_feature: Useful for controlling a pest organism
atggaacatattaaagaaaacagtttaagtggtcttttaggatattattataatagcgaggattttaccgatttagcgcttatgaaagtagcaagaaaagatggagattttacattaagacaggacgaggttaaaggtatattaccaccatcaaattatgaaattcgatctttccgttgcattggttttattaccccttctcaaactggagaatacctatttgcaacttctcatgatcaaaaagttatgatgcaaatcgagggagcaacaattattaatgaagcccctatgcaaaaaaaggtttatttagaagaaggaaaaatgtatgaaatacgtgtggagtatcagcaaagcaaaaagatagacatggatattttgtttgaattccagttatattgggcatttgaagatgaaaatatatctctaattcctactgaaaatttgattggacctcaaacttctgatagaaatagaacacaaaaacaaaaaaacattccagaagtaagtttatttgcagataaatataatttaaatataaaatctactaaagtggatgtagatacagatgatgatagtatctcagatgattgggaaattaacggttatactgcagaagggaaactaattgcgagatggagagaagattaccacccgagtcgtggatatacaaaatatcgttctaatccatatcgagcgcatactgctggagatgcctattcggatatagagaaggctattgacgatatggatcctaatagaaaatcagaaacagtgaatccattggtagcagctattccagaagttcgtgtggatatggaaaatttaaacgtgataaaaattgataatattggaaatgatgtaagtcaaacggatacagaatctgcgagttacagtacgacagagtcgattacagctggtgtaagtgtagaagaaagtgcctctcttgtcgattttggtgtaaaagtgtcaaccaatttttctgcgactacatcaagtacagcatcgtatgaaaattcaacctctaagacatggtcacaacaactaaactttaataccaatgatcgcgctcgtttaaatgcacaggtgcgttatcataatacaggctctattccaatttataaagtacagccaacaagtagttttgtattacaaaatggatctaagaatggatacacaattcgaacagtgacagcaaaaaataaccaggttggagaggttttaaatccaggttccacgtatcctgaaggtggtgccgcaatttcgttagataaaattgatgattttggtacgacagatattactattgatgaaaaaacattaaaagaattagaaaagataggttctttggatttacaaactcctcaggctgaaggatattataaaaaagttaataattccggaggaacgaatatctatcctggttttgcttctatccaaaatgatgtgagaggaagaactgcacatttaattttgagcacaaaaaatgaaactattgacagacatgtagctgtaagagactattctcgtaatgatttgactcctgaattaacgctaggagaagcaattcaaattgcttttggtggtaagttaattaatgggattatggaagttggtggaatgaagattgatcctaaacacgcagagggacaaattattcttaatgtagatacaggagcagagtttgcacgtcaattaaaaggtatgtcaaataaaaacattttaaatgtgaaattaaagatgttagaaaatatatcacaaaaaaatgatatgaaaattttaattacatctgttcacttggatgaaattgctttaggtcacgaaccagctactatcactacgtttcgtgatgattacacaggtaaaacagtttgtagtggtgttagatttaaaccagtgacaaatcaagtatacaatacaattactggataccgtttgaagttgaagtggctcaacgaaaaggctgataaatacgggcaagaatcagatggttctgtatacgtaaacttttttgagtatagtggtttttacgattcattcccagctccaaatagtagtgatcggattgaaatatacgcaataacaaaacatggtgatgaagtacttgtattaagtgaagaagctagatatttaccaggtgcaaatccaggaccaagtggaaagcctaaaataaataataattaa

SEQ ID NO: 138 - protein, 726 aa, Bacillus sp.
  misc_feature: SGI Peptide ID NO. AGRMET1T219032
  misc_feature (185)..(584): Pfam Id: PF03495 Pfam Desc: Clostridial binary toxin B/anthrax toxin PA
  misc_feature (10)..(141): Pfam Id: PF07691 Pfam Desc: PA14 domain
  misc_feature (6)..(578): NCBI GI: 196048174 Blast Desc: iota toxin component Ib [Bacillus cereus 03BB108] gi|196020911|gb|EDX59641.1| iota toxin component Ib [Bacillus cereus 03BB108]
  misc_feature (5)..(579): NCBI GI: 228949414 Blast Desc: Iota toxin component Ib [Bacillus thuringiensis serovar monterrey BGSC 4AJ1] gi|228810267|gb|EEM56627.1| Iota toxin component Ib [Bacillus thuringiensis serovar monterrey BGSC
  misc_feature (2)..(584): NCBI GI: 330368260 Blast Desc: CdtB [Clostridium difficile]
  misc_feature (10)..(584): NCBI GI: 2340082 Blast Desc: ADP-ribosyltransferase binding component [Clostridium difficile CD196]
  misc_feature (10)..(584): NCBI GI: 330368236 Blast Desc: CdtB [Clostridium difficile]
  misc_feature (2)..(584): NCBI GI: 330368252 Blast Desc: CdtB [Clostridium difficile]
  misc_feature (10)..(584): NCBI GI: 254976197 Blast Desc: C2 toxin,component II [Clostridium difficile QCD-66c26] gi|255093586|ref|ZP_05323064.1| C2 toxin,component II [Clostridium difficile CIP 107932] C2 toxin,component II C2 II C2
  misc_feature (10)..(584): NCBI GI: 8926248 Blast Desc: AF271719_2 CdtB [Clostridium difficile] gi|330368264|gb|AEC11579.1| CdtB [Clostridium difficile]
  misc_feature (10)..(584): NCBI GI: 330368240 Blast Desc: CdtB [Clostridium difficile]
  misc_feature (2)..(584): NCBI GI: 255656585 Blast Desc: C2 toxin,component II [Clostridium difficile QCD-23m63] gi|296449962|ref|ZP_06891726.1| iota toxin component Ib [Clostridium difficile NAP08] gi|296878343|ref|ZP_06902351.1|
  misc_feature: Useful for conferring pesticidal activity to an organism
  misc_feature: Useful for controlling a pest organism
MEHIKENSLSGLLGYYYNSEDFTDLALMKVARKDGDFTLRQDEVKGILPPSNYEIRSFRCIGFITPSQTGEYLFATSHDQKVMMQIEGATIINEAPMQKKVYLEEGKMYEIRVEYQQSKKIDMDILFEFQLYWAFEDENISLIPTENLIGPQTSDRNRTQKQKNIPEVSLFADKYNLNIKSTKVDVDTDDDSISDDWEINGYTAEGKLIARWREDYHPSRGYTKYRSNPYRAHTAGDAYSDIEKAIDDMDPNRKSETVNPLVAAIPEVRVDMENLNVIKIDNIGNDVSQTDTESASYSTTESITAGVSVEESASLVDFGVKVSTNFSATTSSTASYENSTSKTWSQQLNFNTNDRARLNAQVRYHNTGSIPIYKVQPTSSFVLQNGSKNGYTIRTVTAKNNQVGEVLNPGSTYPEGGAAISLDKIDDFGTTDITIDEKTLKELEKIGSLDLQTPQAEGYYKKVNNSGGTNIYPGFASIQNDVRGRTAHLILSTKNETIDRHVAVRDYSRNDLTPELTLGEAIQIAFGGKLINGIMEVGGMKIDPKHAEGQIILNVDTGAEFARQLKGMSNKNILNVKLKMLENISQKNDMKILITSVHLDEIALGHEPATITTFRDDYTGKTVCSGVRFKPVTNQVYNTITGYRLKLKWLNEKADKYGQESDGSVYVNFFEYSGFYDSFPAPNSSDRIEIYAITKHGDEVLVLSEEARYLPGANPGPSGKPKINNN

SEQ ID NO: 139 - DNA, 3057 bp, Bacillus sp.
  misc_feature: SGI cDNA ID NO. AGRMET1G218883
  misc_feature: Encodes the peptide sequence at SEQ ID NO. 140
  misc_feature: Useful for conferring pesticidal activity to an organism
  misc_feature: Useful for controlling a pest organism
atgaataaaaaaaatataagaaaaatatatgtatacgtagcaaatgcactagtattatcatcatttatctttctttctggtcatttacaagcggaagaaatactaataaaaacagatcaaataaaaaagagtaccgttgaaaataagaatgggttaatgggatattattttataggtaaagattttcaaaacttagtgttaatatctccatgtaaaaatggggaatttcaagtaactaaagagaaggtaaatcaattattaagcacagaaaaacaaaggattcaagctgcaagatgggtgggatacattaagccttctgagagtggtgaatatgaattctctacttcttcagatgaacaggtagtgctgcaaattgataaaaaaatagttatggatgtatttgatttgaaaggaaaagtaaaattagaaaaagataaattatatgaagtccggctggagtatataccagaagataaagacataaaagataagctagtaaatttacagttattctggtcaagtaatagtattccaaaagaagtagttccagaacaaaatcttatagcaccagatttttctcttaccaacaaaacaaagtggattccagaacaaaatttaatttcttccaatgagccaagagatcgtgtgaaaagaagtttgaatgaaaaactaataacaaaagatacagatggtgattcaattcccgatgattgggaaaaagaaggttataccattgtaaatcaaaacgctgtaaagtgggaagaacaaatggctgaaaatggatatacaaagtatgtttcaaatccggataggcagaatacaacaggagatccgtataccgattttcaaaaggcttctggtcaaatagatccagcaataaaagaagttgcacacaatccattaattgcagcgtatccgagaattggagttcaattagagaatgttgtaatttcgaaaaataatgatataacagaatcacaagggggagaaacgagtacctccattacaaaaggtacttctaatagtaaaacaaatgaaacgtctacgggaattgataaatcagtcaatacaacgatcgaagcatccatgtcaccctctttatcggtaagtgtaagtgtgtcaaaatcatttaatgaatcaaatagttcaactgcaacaatagatgaatcagaatctaatacatcgggaacaaattggtcaagatcaattgggttaaatacagcacaatccgcttacctaggagccaggattcgatatttgaatacgggaacagctcctgcatatgaagtcaaaccagatgttacgttaggaattggaaagaagtatacatttacatcaggaattgttgcagataaatataaagcaaatgtattaaatccagatgcagtatttcctccaaaagaaagtttgcctattctattgaataaacatgtagatgcaccaatttctattgatattaatcagttaaatgaattgcaaaaaataaaaaaagttcgattagattcaacccaatatgacgctttagtaggtctaatcggacctcaggcaatgcaaaaatgggtgaaatttacgaatgatattgaacatatgactgcccgaattatttttgtatctcctatgggatggatagaacgaagagtagcggcaccggttaaaccaaatcatccagaagataagtatccgaaaataaaagtagatgacgctttagacattgcagttgatggttataagaagacggaaaatggttatcaatataatgactatacgtttcaatctttacattttatttatgatgaagcaacggctgaaaaattcaaagaacaagcaaaaaaatcaaatgatggaaaattaaatccaatggatctacaattaaacgcaaaaatgaatattcaaatctccccaaaaggttgggtaactaataataaaaccaataaaaaatattattataacgaaaaaggcattaaagtaacaggcatacaaaatatagataataaattatatgaatttgataaaaatggggtattcttaaaagaaaaagaagatgttgaatataaaattaataaagatgaatttaaagcaactttcattttccctaaggctccgagtacttggtttaatattaaaacaatgcataattcaaatgtggaaacagtaacattgcaaatcaatgatagtaatatatatggttttgggaaacaagatggacgttataatagtgagttagcggtaaaaaaaacggaagttggaaatgagatagaaagtggctggacactgaaagatcaaacttctaaagatggaaagtatctttttaaatttaaccattattatgaagatggaacaataaaggtctatgaatatgaatataatgaaaatgaaaaagtaataaaaccaataaaagaaggaaatatacagagaggttggaaaacaattgatgagaaaaaatattactatgagagtggggagatggtaaaaaatttagtgaaagaattcaaaaccaataaaggaataaagaaatattattttgataaagacggtgtgatgaggacgaattattggcataaagaagttgatggaaaaacaaaagtgtactttggaagtgatggtgaattaataggaatggatgcaagttttcatacaattgatggaaaaacttattactttaaaaatagtaaaatggtaataggttggcaaataattggtgataaaacttattattttaggagaaatagagaagggattttatcatttgaagaaggtaaaatggtaacaggttggcaaataattggtgggaagaagtattattttggtgaaaaaggggatggtattgcatcattagaaataggagaaatggcaacaggttggaaaacaattagtgggaagaggtattactttggtgaaaaaagagaaggcatttcatcattagaaataggagaaatggcgaaagcaagagttaaaatagatggtcaggaatatatatttgtaaatggagttctgaagggaaaggttaggaaggaatgtaatatgtatggttgttggaatacagatgtaaggttgtga

SEQ ID NO: 140 - protein, 1018 aa, Bacillus sp.
  misc_feature: SGI Peptide ID NO. AGRMET1T218883
  misc_feature (227)..(634): Pfam Id: PF03495 Pfam Desc: Clostridial binary toxin B/anthrax toxin PA
  misc_feature (49)..(184): Pfam Id: PF07691 Pfam Desc: PA14 domain
  misc_feature (5)..(632): NCBI GI: 196048174 Blast Desc: iota toxin component Ib [Bacillus cereus 03BB108] gi|196020911|gb|EDX59641.1| iota toxin component Ib [Bacillus cereus 03BB108]
  misc_feature (6)..(687): NCBI GI: 339008398 Blast Desc: protective antigen [Brevibacillus laterosporus LMG 15441] gi|338774198|gb|EGP33728.1| protective antigen [Brevibacillus laterosporus LMG 15441]
  misc_feature (48)..(686): NCBI GI: 339008426 Blast Desc: protective antigen [Brevibacillus laterosporus LMG 15441] gi|338774226|gb|EGP33756.1| protective antigen [Brevibacillus laterosporus LMG 15441]
  misc_feature (7)..(656): NCBI GI: 208743338 Blast Desc: protective antigen [Bacillus cereus] gi|301068197|ref|YP_003786968.1| protective antigen [Bacillus cereus biovar anthracis str. CI] gi|300379285|gb|ADK08188.1| str.
  misc_feature (29)..(656): NCBI GI: 225871637 Blast Desc: protective antigen [Bacillus cereus 03BB102] gi|225785567|gb|ACO25785.1| protective antigen [Bacillus cereus 03BB102]
  misc_feature (7)..(656): NCBI GI: 165873490 Blast Desc: protective antigen [Bacillus anthracis str. A0488] gi|227811585|ref|YP_002811596.1| protective antigen [Bacillus anthracis str. CDC 684] gi|254756538|ref|ZP_05208567.1| antigen
  misc_feature (51)..(656): NCBI GI: 194305713 Blast Desc: fusion of EF and PA with Glycine as linker [synthetic construct]
  misc_feature (38)..(640): NCBI GI: 168206011 Blast Desc: iota toxin component Ib [Clostridium perfringens E str. JGS1987] gi|414655|emb|CAA51960.1| iota toxin component Ib [Clostridium perfringens] gi|170662542|gb|EDT15225.1| iota toxin
  misc_feature (7)..(656): NCBI GI: 10956357 Blast Desc: pxo1_110 [Bacillus anthracis] gi|21392840|ref|NP_652920.1| protective antigen [Bacillus anthracis str. A2012] gi|47566476|ref|YP_016495.2| protective 94]
  misc_feature (7)..(656): NCBI GI: 143282 Blast Desc: protective antigen precursor [Bacillus anthracis]
  misc_feature: Useful for conferring pesticidal activity to an organism
  misc_feature: Useful for controlling a pest organism
MNKKNIRKIYVYVANALVLSSFIFLSGHLQAEEILIKTDQIKKSTVENKNGLMGYYFIGKDFQNLVLISPCKNGEFQVTKEKVNQLLSTEKQRIQAARWVGYIKPSESGEYEFSTSSDEQVVLQIDKKIVMDVFDLKGKVKLEKDKLYEVRLEYIPEDKDIKDKLVNLQLFWSSNSIPKEVVPEQNLIAPDFSLTNKTKWIPEQNLISSNEPRDRVKRSLNEKLITKDTDGDSIPDDWEKEGYTIVNQNAVKWEEQMAENGYTKYVSNPDRQNTTGDPYTDFQKASGQIDPAIKEVAHNPLIAAYPRIGVQLENVVISKNNDITESQGGETSTSITKGTSNSKTNETSTGIDKSVNTTIEASMSPSLSVSVSVSKSFNESNSSTATIDESESNTSGTNWSRSIGLNTAQSAYLGARIRYLNTGTAPAYEVKPDVTLGIGKKYTFTSGIVADKYKANVLNPDAVFPPKESLPILLNKHVDAPISIDINQLNELQKIKKVRLDSTQYDALVGLIGPQAMQKWVKFTNDIEHMTARIIFVSPMGWIERRVAAPVKPNHPEDKYPKIKVDDALDIAVDGYKKTENGYQYNDYTFQSLHFIYDEATAEKFKEQAKKSNDGKLNPMDLQLNAKMNIQISPKGWVTNNKTNKKYYYNEKGIKVTGIQNIDNKLYEFDKNGVFLKEKEDVEYKINKDEFKATFIFPKAPSTWFNIKTMHNSNVETVTLQINDSNIYGFGKQDGRYNSELAVKKTEVGNEIESGWTLKDQTSKDGKYLFKFNHYYEDGTIKVYEYEYNENEKVIKPIKEGNIQRGWKTIDEKKYYYESGEMVKNLVKEFKTNKGIKKYYFDKDGVMRTNYWHKEVDGKTKVYFGSDGELIGMDASFHTIDGKTYYFKNSKMVIGWQIIGDKTYYFRRNREGILSFEEGKMVTGWQIIGGKKYYFGEKGDGIASLEIGEMATGWKTISGKRYYFGEKREGISSLEIGEMAKARVKIDGQEYIFVNGVLKGKVRKECNMYGCWNTDVRL

SEQ ID NO: 141 - DNA, 2637 bp, Bacillus sp.
  misc_feature: SGI cDNA ID NO. AGRMET1G219117
  misc_feature: Encodes the peptide sequence at SEQ ID NO. 142
  misc_feature: Useful for conferring pesticidal activity to an organism
  misc_feature: Useful for controlling a pest organism
ttgaaaaaggagcaggaaaaaatgaatattaaaacaatgtataaagtgcttgcaactacggcactggtaggacaaattatggcagcaccgattggtgcacatgctcaaacggcatcagataaggtgaatactgaagttgtacaacatgatgtgaaaaatgggttgtctgcaacatattttaaggataaatattttaaaaaagttgcttttatttcagataagccaggctttgaaatgaataaatcagaaattgaagatctgttaattccagaagaacaaaagtttcaatctgtgcgttgggttggtgtcatcaaagctcctaaaaacggagaatacctgttttcttcatctgctgaccaagatgctaaaatagaagtagatggaaaagttgtaactgataagaaaatcaatttagaaaaagataaattctatcgtgttcgaatagaatatcgcccaaaacaagaatcaactacagacaaattggtgaattttaaatgttattggtctatttcagatgatgaaaaaacagagataccaacagaaaatttatttttaccagatttatctcagcctgtaaaaaaatatgatgcaaatttatttggggataaagatgaatctgttttttacggtgatggtgaatgtaatataactagtaatgatgaagattgtgactgggacgatgatggtattccgaacggctgggaatatgaaggttattcatataataatacctctttagtcagatggaagtctttaaaagatgacaaaaaagcaattttaccgaaatataggtccaatcctaatttatcacatactgcaggggatccatttagtgatagacaaaaggcaacaggctacatgggtggtggagaaagtcaggaagcacgtaatccacaggtagctgcttatccagaatttagaataaacttggatcaattagttgtaagcccaacaaaacatgtgagccttgacaaaagtgagagtaaatctacagctactagcaccactgccacagattccaaaacagaagaaagcggaacttcacttggcatgaatgtggaaataggaattaaaaacgtcggattcggtgtctcacaaagtttttcagagtctagttccacgtcgcactccgtgtctgtaacaaacgacacttcaaatggaacaagcgtttcaacttcagaaggatatgatacaggacatgcggcacttgtaaatgctaatataacatatgaaaatacaggtacagcccctatttataatgggaaaccaaccatcaatcttgaagcgtctgatggcacagtgctatttacagcaaaatcacaagataatacacaagttaaccatttggcaccaggagggacatatggaccaatcgcctttagaacaagcgatcaatttgaaaatcagccgattgcacttactttagatcagttgactagatatatgagtggagaaccaatgaaaattaaatttatgcaatttgtaggtgattaccaaacattcgacaaagatagagcggactggagtaaagtgactggtgatattcaagatcgaacagctactttggtattggatgctggtaaagatagttctggaaagaatgaaatattagatagaagaatagcagtttcagcaactagtaaaacaaaaaatgagtttttcacccctgaaacaactcttaaagaggcaatcaaaattgcatttaatgctaaagaggatgcagagggtaatttgttttattccggtaaaaacggaaaaacaatccattttgtaaaaggaaaagcagactttaacgttggaaacaaaatcgcagcagatgaggtactgcaacaaaaatcagaagatccactaaaggttgtattaagaccgggaatgaaaattacgattacagagcatgaagaggcagcgaaaacaggatggaagacgattgaaggaaagaaatattactttgatacggaagatagcaagcataaaggtaaactgattcttgatgggaaaacatactatcttgattcaagtacgggcgaattacaaacaggatggaaaacgattgaagggaagaaatactatttcgatccgagcgcgagtggcatcatgaagacaggctggttaactcttagtgataaaaaatattatctaaattcagatggaagcttgcaaacaacattgaaattagttgatggaaaagcatacaaatttgatccaaatgatggacatgtccttggagaagtaaatgggcaagatatacaagcggctcatgaatataataaggttctattatcttcaaaatctatagctgtaggtaaagatgatgtgaagtcaattgaagggatttcacttaaaataaaagataaggatatgttcagtgcattaataactggttataaaattaaacttggcaatgaagaacttggaacatatccagcatcaattaaaaatgataacactattgatttaatgtttgcaacgtatgataaaaaattcaatgtagaaggcatgacgtcggatgctcttaacagaagagtggcttactataaagaggaactaaaagtatatgctataacttctactaaggaagaggtagaaatctttaagggaacttgcgcggataagcttggcatctatgtcgctggataa

SEQ ID NO: 142 - protein, 878 aa, Bacillus sp.
  misc_feature: SGI Peptide ID NO. AGRMET1T219117
  misc_feature (223)..(631): Pfam Id: PF03495 Pfam Desc: Clostridial binary toxin B/anthrax toxin PA
  misc_feature (52)..(180): Pfam Id: PF07691 Pfam Desc: PA14 domain
  misc_feature (8)..(629): NCBI GI: 196048174 Blast Desc: iota toxin component Ib [Bacillus cereus 03BB108] gi|196020911|gb|EDX59641.1| iota toxin component Ib [Bacillus cereus 03BB108]
  misc_feature (8)..(698): NCBI GI: 339008426 Blast Desc: protective antigen [Brevibacillus laterosporus LMG 15441] gi|338774226|gb|EGP33756.1| protective antigen [Brevibacillus laterosporus LMG 15441]
  misc_feature (8)..(629): NCBI GI: 2117115 Blast Desc: Sb component [Clostridium spiroforme]
  misc_feature (7)..(629): NCBI GI: 330368252 Blast Desc: CdtB [Clostridium difficile]
  misc_feature (8)..(582): NCBI GI: 168206011 Blast Desc: iota toxin component Ib [Clostridium perfringens E str. JGS1987] gi|414655|emb|CAA51960.1| iota toxin component Ib [Clostridium perfringens] gi|170662542|gb|EDT15225.1| iota toxin
  misc_feature (8)..(580): NCBI GI: 338815012 Blast Desc: iota toxin component Ib [Clostridium perfringens] gi|338160398|dbj|BAK40944.1| iota toxin component Ib [Clostridium perfringens]
  misc_feature (7)..(629): NCBI GI: 255656585 Blast Desc: C2 toxin,component II [Clostridium difficile QCD-23m63] gi|296449962|ref|ZP_06891726.1| iota toxin component Ib [Clostridium difficile NAP08] gi|296878343|ref|ZP_06902351.1|
  misc_feature (7)..(629): NCBI GI: 2340082 Blast Desc: ADP-ribosyltransferase binding component [Clostridium difficile CD196]
  misc_feature (7)..(629): NCBI GI: 330368240 Blast Desc: CdtB [Clostridium difficile]
  misc_feature (7)..(629): NCBI GI: 8926248 Blast Desc: AF271719_2 CdtB [Clostridium difficile] gi|330368264|gb|AEC11579.1| CdtB [Clostridium difficile]
  misc_feature: Useful for conferring pesticidal activity to an organism
  misc_feature: Useful for controlling a pest organism
MKKEQEKMNIKTMYKVLATTALVGQIMAAPIGAHAQTASDKVNTEVVQHDVKNGLSATYFKDKYFKKVAFISDKPGFEMNKSEIEDLLIPEEQKFQSVRWVGVIKAPKNGEYLFSSSADQDAKIEVDGKVVTDKKINLEKDKFYRVRIEYRPKQESTTDKLVNFKCYWSISDDEKTEIPTENLFLPDLSQPVKKYDANLFGDKDESVFYGDGECNITSNDEDCDWDDDGIPNGWEYEGYSYNNTSLVRWKSLKDDKKAILPKYRSNPNLSHTAGDPFSDRQKATGYMGGGESQEARNPQVAAYPEFRINLDQLVVSPTKHVSLDKSESKSTATSTTATDSKTEESGTSLGMNVEIGIKNVGFGVSQSFSESSSTSHSVSVTNDTSNGTSVSTSEGYDTGHAALVNANITYENTGTAPIYNGKPTINLEASDGTVLFTAKSQDNTQVNHLAPGGTYGPIAFRTSDQFENQPIALTLDQLTRYMSGEPMKIKFMQFVGDYQTFDKDRADWSKVTGDIQDRTATLVLDAGKDSSGKNEILDRRIAVSATSKTKNEFFTPETTLKEAIKIAFNAKEDAEGNLFYSGKNGKTIHFVKGKADFNVGNKIAADEVLQQKSEDPLKVVLRPGMKITITEHEEAAKTGWKTIEGKKYYFDTEDSKHKGKLILDGKTYYLDSSTGELQTGWKTIEGKKYYFDPSASGIMKTGWLTLSDKKYYLNSDGSLQTTLKLVDGKAYKFDPNDGHVLGEVNGQDIQAAHEYNKVLLSSKSIAVGKDDVKSIEGISLKIKDKDMFSALITGYKIKLGNEELGTYPASIKNDNTIDLMFATYDKKFNVEGMTSDALNRRVAYYKEELKVYAITSTKEEVEIFKGTCADKLGIYVAG

SEQ ID NO: 143 - DNA, 249 bp, Bacillus sp.
  misc_feature: SGI cDNA ID NO. AGRMET1G697885
  misc_feature: Encodes the peptide sequence at SEQ ID NO. 144
  misc_feature: Useful for conferring pesticidal activity to an organism
  misc_feature: Useful for controlling a pest organism
gatgcgcgtacatatccaatcgaaacaacagctcaacttactcgagaagtgtacactgatccaataggatataacccatcaaatccagaaggttcaggatttggtattccttgggcgaatcttaaatcacatgattttactcaaatcgagagagaagtaattcgtccaccacatgcatttagtatattaaattcagtagaaatacgtacagtaaaggcgatagcttttgtttacgttgtgattttttaa

SEQ ID NO: 144 - protein, 82 aa, Bacillus sp.
  misc_feature: SGI Peptide ID NO. AGRMET1T697885
  misc_feature (9)..(71): Pfam Id: PF00555 Pfam Desc: delta endotoxin
  misc_feature (1)..(71): NCBI GI: 228911986 Blast Desc: Pesticidal crystal protein cry8Ba [Bacillus thuringiensis IBL 200] gi|228847641|gb|EEM92570.1| Pesticidal crystal protein cry8Ba [Bacillus thuringiensis IBL 200]
  misc_feature (1)..(73): NCBI GI: 158021540 Blast Desc: insecticidal crystal protein [Bacillus thuringiensis]
  misc_feature (1)..(74): NCBI GI: 237511651 Blast Desc: pesticidal crystal protein [Bacillus thuringiensis]
  misc_feature (1)..(73): NCBI GI: 8928018 Blast Desc: CR8AA_BACUK RecName: Full=Pesticidal crystal protein cry8Aa; AltName: Full=131 kDa crystal protein; AltName: Full=Crystaline entomocidal protoxin; AltName: Full=Insecticidal
  misc_feature (1)..(73): NCBI GI: 295039402 Blast Desc: Cry8Da protein [Bacillus thuringiensis serovar galleriae]
  misc_feature (1)..(73): NCBI GI: 295039404 Blast Desc: Cry8Da protein [Bacillus thuringiensis serovar galleriae]
  misc_feature (1)..(73): NCBI GI: 295039398 Blast Desc: Cry8Da protein [Bacillus thuringiensis serovar galleriae]
  misc_feature (1)..(73): NCBI GI: 295039400 Blast Desc: Cry8Da protein [Bacillus thuringiensis serovar galleriae]
  misc_feature (1)..(73): NCBI GI: 22122188 Blast Desc: cry8 [Bacillus thuringiensis serovar galleriae]
  misc_feature (1)..(73): NCBI GI: 160420050 Blast Desc: Cry8Dlike [Bacillus thuringiensis]
  misc_feature: Useful for conferring pesticidal activity to an organism
  misc_feature: Useful for controlling a pest organism
DARTYPIETTAQLTREVYTDPIGYNPSNPEGSGFGIPWANLKSHDFTQIEREVIRPPHAFSILNSVEIRTVKAIAFVYVVIF

SEQ ID NO: 145 - DNA, 1218 bp, Bacillus sp.
  misc_feature: SGI cDNA ID NO. AGRMET1G218491
  misc_feature: Encodes the peptide sequence at SEQ ID NO. 146
  misc_feature: Useful for conferring pesticidal activity to an organism
  misc_feature: Useful for controlling a pest organism
atgaaatcaatatcaaaaaaagtcatggcagggttacttgtaggcgcaacgagtctatctatctgggctccttcaagtcaagcagaagctccaaagaatgatcgatattattctattcatatgaaatctaatccaaaaaaagtttggaatgtatctcaagcatctaatgataaggatagagcgattcttttatggcagggaggaactgctgataatgaaaaatttgcatttttccaacttgatggaggagcatatgcaattgtaaataaaaatagtgggaaaattgtcacatttgctgattctggtcaagttagttggtttagtgatagaagtttacttggtccgggttctttacagcaacagagttggaatggtgcggctaagcaaaaatggaatttacgagacttgggaagtaataattatgaaattatgaaccaaggaaatgggaaagttgcatcttatgcatggcaggggacactagctgataatgtagagtatgtagatttggataattcaaatccgtctgatccagataaggtatttaaactttttgacggtagtggtactattctcttccctggtactgtgattccaactccaattggaccagatagtagtatttcagtaccaaacttaccagctacaggaactagaccagatgctccaaattatactggaggtgttgatcaacaattacctcaaacttcaaattctgttgttgttggggcatctttaataccttgtattatggtaaatgataatcaagcgagtgattatacaaaaatacacaattcaccatattatactttggtaaaagaagaatattgggataaaacattttcagcagttattccagctggtttgactcgtaactattcatttaaaacaggtatgacttctgtagatcaacaaaagatgactgacacgctttctatgaagattggagcagattttggattgaaatttggagacgcaactgcatcaattaaatcagagatttcaagaacattacaaacagaaattagtacaacgaatacagaagcatcggaagaaacagttacaagtacggttataagtgaacctggtaaaacaacaggatatacagaatatcaactggcaacaaaatatacgttaaagagagcagatggctcaattgtttcagatccttgggttgtaaaaaacaataagatcacaatagctagaaaaaatgcacaataa

SEQ ID NO: 146 - protein, 405 aa, Bacillus sp.
  misc_feature: SGI Peptide ID NO. AGRMET1T218491
  misc_feature (210)..(398): Pfam Id: PF05431 Pfam Desc: Insecticidal Crystal Toxin, P42
  misc_feature (9)..(405): NCBI GI: 229100569 Blast Desc: 41.9 kDa insecticidal toxin [Bacillus cereus Rock3-29] gi|229106953|ref|ZP_04237053.1| 41.9 kDa insecticidal toxin [Bacillus cereus Rock3-28] gi|229119132|ref|ZP_04248459.1| 41.9
  misc_feature (47)..(401): NCBI GI: 228911944 Blast Desc: 41.9 kDa insecticidal toxin [Bacillus thuringiensis IBL 200] gi|228847693|gb|EEM92619.1| 41.9 kDa insecticidal toxin [Bacillus thuringiensis IBL 200]
  misc_feature (32)..(390): NCBI GI: 229170564 Blast Desc: 41.9 kDa insecticidal toxin [Bacillus cereus AH621] gi|228612913|gb|EEK70090.1| 41.9 kDa insecticidal toxin [Bacillus cereus AH621]
  misc_feature (207)..(401): NCBI GI: 117318 Blast Desc: BINA2_BACSH RecName: Full=41.9 kDa insecticidal toxin; AltName: Full=Strain 2297 gi|40223|emb|CAA30074.1| protein product [Lysinibacillus sphaericus] gi|4467365|emb|CAB37658.1|
  misc_feature (207)..(401): NCBI GI: 2293380 Blast Desc: P42 component of the binary toxin [Lysinibacillus sphaericus]
  misc_feature (207)..(401): NCBI GI: 3641861 Blast Desc: BinA4 protein [Lysinibacillus sphaericus]
  misc_feature (207)..(401): NCBI GI: 169825568 Blast Desc: insecticidal toxin [Lysinibacillus sphaericus C3-41] gi|169828673|ref|YP_001698831.1| insecticidal toxin [Lysinibacillus sphaericus C3-41] RecName: Full=41.9 kDa toxin;
  misc_feature (207)..(401): NCBI GI: 112297518 Blast Desc: binary toxin A [Lysinibacillus sphaericus]
  misc_feature (207)..(401): NCBI GI: 117319 Blast Desc: BINA3_BACSH RecName: Full=41.9 kDa insecticidal toxin; AltName: Full=Strain IAB59 gi|40226|emb|CAA33087.1| protein product [Lysinibacillus sphaericus]
  misc_feature (207)..(401): NCBI GI: 2293372 Blast Desc: P42 component of the binary toxin [Lysinibacillus sphaericus] gi|2293374|emb|CAA73758.1| P42 component of the binary toxin [Lysinibacillus sphaericus] P42 component of the P42
  misc_feature: Useful for conferring pesticidal activity to an organism
  misc_feature: Useful for controlling a pest organism
MKSISKKVMAGLLVGATSLSIWAPSSQAEAPKNDRYYSIHMKSNPKKVWNVSQASNDKDRAILLWQGGTADNEKFAFFQLDGGAYAIVNKNSGKIVTFADSGQVSWFSDRSLLGPGSLQQQSWNGAAKQKWNLRDLGSNNYEIMNQGNGKVASYAWQGTLADNVEYVDLDNSNPSDPDKVFKLFDGSGTILFPGTVIPTPIGPDSSISVPNLPATGTRPDAPNYTGGVDQQLPQTSNSVVVGASLIPCIMVNDNQASDYTKIHNSPYYTLVKEEYWDKTFSAVIPAGLTRNYSFKTGMTSVDQQKMTDTLSMKIGADFGLKFGDATASIKSEISRTLQTEISTTNTEASEETVTSTVISEPGKTTGYTEYQLATKYTLKRADGSIVSDPWVVKNNKITIARKNAQ

SEQ ID NO: 147 - DNA, 1218 bp, Bacillus sp.
  misc_feature: SGI cDNA ID NO. AGRMET1G218662
  misc_feature: Encodes the peptide sequence at SEQ ID NO. 148
  misc_feature: Useful for conferring pesticidal activity to an organism
  misc_feature: Useful for controlling a pest organism
atgaaatcaatatcaaaaaaagttatggcagggttacttgtaggagcaacgagtctatctatctgggctccttcaagtgaagcagcagctccagagaaaaatcgatattatagtattcatttaaaagctaatccgaatttagcttggggtgtattaggcaatgataataatagagcaatttttttattgcctggaaacgctggtgacaatgcacaatttgtattttttccacttgatggacaaaattatgcaattgtaaataaaaatagtggaaaacctgcaacatttggagttattagtcctgatccctttggtactaacaatgacggtatggtgactaataatagggagtctttgctacaacggagttggacaggtgcttctactgaacaatggtatttacgagacaagggaaataataattatgaaattgtgaaccaaggaaatgggaaagtagcatcttatgcacggggggtgatagactatgtagatttggatgaatcaaatccttctgattcagatagggtatttaacattgataagagtccagggggtattgaattcccaggtatcccaggtatggatatgagttacggtacttttttattaccaactttaccagatgtagggactagaccggaagctcccgattataataatacacttaaagatcctaatgaacaattacctcaaacttcagagtctgttgttgttggagcatctttaataccttgtattatggtaaaggatagtcaaacgagtgattatacaaaaatacacaattcaccatattatactttggtaaaagaagaatattgggagaaagtattttcagcggttgttccagcaggtgtgactcgtaattatacattaaaaacaggtatgactaaggtagatcaacaaaaaatgactgatacgctttctatgagcattggaacagattttggattgaaatttggagaggcaactgcatcacttaaagcaagtattacaaaaacattacaaacagaaattagtacaactgaaactaatatagacgaagactcagattcagttactgttacaagtgcagctggtaagacaacaggatatacaggatatcaactggtaacaaaatatacgttaaagagagcggatggttcagttgtttcaaatccttggactgtaaaaaaacctaagaacacagcagtaagaccaatggagaaagttaataattaa

SEQ ID NO: 148 - protein, 405 aa, Bacillus sp.
  misc_feature: SGI Peptide ID NO. AGRMET1T218662
  misc_feature (204)..(397): Pfam Id: PF05431 Pfam Desc: Insecticidal Crystal Toxin, P42
  misc_feature (9)..(402): NCBI GI: 229100569 Blast Desc: 41.9 kDa insecticidal toxin [Bacillus cereus Rock3-29] gi|229106953|ref|ZP_04237053.1| 41.9 kDa insecticidal toxin [Bacillus cereus Rock3-28] gi|229119132|ref|ZP_04248459.1| 41.9
  misc_feature (131)..(402): NCBI GI: 228911944 Blast Desc: 41.9 kDa insecticidal toxin [Bacillus thuringiensis IBL 200] gi|228847693|gb|EEM92619.1| 41.9 kDa insecticidal toxin [Bacillus thuringiensis IBL 200]
  misc_feature (54)..(388): NCBI GI: 229170564 Blast Desc: 41.9 kDa insecticidal toxin [Bacillus cereus AH621] gi|228612913|gb|EEK70090.1| 41.9 kDa insecticidal toxin [Bacillus cereus AH621]
  misc_feature (69)..(387): NCBI GI: 3641861 Blast Desc: BinA4 protein [Lysinibacillus sphaericus]
  misc_feature (69)..(387): NCBI GI: 2293380 Blast Desc: P42 component of the binary toxin [Lysinibacillus sphaericus]
  misc_feature (69)..(387): NCBI GI: 117318 Blast Desc: BINA2_BACSH RecName: Full=41.9 kDa insecticidal toxin; AltName: Full=Strain 2297 gi|40223|emb|CAA30074.1| protein product [Lysinibacillus sphaericus] gi|4467365|emb|CAB37658.1|
  misc_feature (66)..(387): NCBI GI: 112297518 Blast Desc: binary toxin A [Lysinibacillus sphaericus]
  misc_feature (69)..(387): NCBI GI: 117319 Blast Desc: BINA3_BACSH RecName: Full=41.9 kDa insecticidal toxin; AltName: Full=Strain IAB59 gi|40226|emb|CAA33087.1| protein product [Lysinibacillus sphaericus]
  misc_feature (69)..(387): NCBI GI: 2293372 Blast Desc: P42 component of the binary toxin [Lysinibacillus sphaericus] gi|2293374|emb|CAA73758.1| P42 component of the binary toxin [Lysinibacillus sphaericus] P42 component of the P42
  misc_feature (203)..(387): NCBI GI: 169825568 Blast Desc: insecticidal toxin [Lysinibacillus sphaericus C3-41] gi|169828673|ref|YP_001698831.1| insecticidal toxin [Lysinibacillus sphaericus C3-41] RecName: Full=41.9 kDa toxin;
  misc_feature: Useful for conferring pesticidal activity to an organism
  misc_feature: Useful for controlling a pest organism
MKSISKKVMAGLLVGATSLSIWAPSSEAAAPEKNRYYSIHLKANPNLAWGVLGNDNNRAIFLLPGNAGDNAQFVFFPLDGQNYAIVNKNSGKPATFGVISPDPFGTNNDGMVTNNRESLLQRSWTGASTEQWYLRDKGNNNYEIVNQGNGKVASYARGVIDYVDLDESNPSDSDRVFNIDKSPGGIEFPGIPGMDMSYGTFLLPTLPDVGTRPEAPDYNNTLKDPNEQLPQTSESVVVGASLIPCIMVKDSQTSDYTKIHNSPYYTLVKEEYWEKVFSAVVPAGVTRNYTLKTGMTKVDQQKMTDTLSMSIGTDFGLKFGEATASLKASITKTLQTEISTTETNIDEDSDSVTVTSAAGKTTGYTGYQLVTKYTLKRADGSVVSNPWTVKKPKNTAVRPMEKVNN

SEQ ID NO: 149 - DNA, 1332 bp, Bacillus sp.
  misc_feature: SGI cDNA ID NO. AGRMET1G218366
  misc_feature: Encodes the peptide sequence at SEQ ID NO. 150
  misc_feature: Useful for conferring pesticidal activity to an organism
  misc_feature: Useful for controlling a pest organism
ggaacaggggaaggaacaacatgggaaaacatacaaaagatcctagattctcaagaatataaaggggatctgcacaagcttgatatacgatcctttgatcgtattgatgctattcaaccatggttttctgataagcagaatggtggttccaattggactactcctggatggactggaaatacaagtgggggggctttaaagactcttataaatccttctgataatccgattactagagttaaggcgcaatcaagccgtactcctaattatattgactttaaatttgatactgggggagataacccttactttggtagatatttttcaggcggatcatacaaagaagatatttttgaatatccgaatcaaaaactttctcaaattcacgcatttaacagaagtacctatccaggatttgaaggtattgatgcagtagtatttgggtttgtcgacaagaatcttacacagtcgtccacttatctaatgacaaatatgataacaacaatcccagctgcaaagtataaccgtggaatgagcaattttcaaccacaagtggaatctatacatgctaagcaaaaagcgatgaaaactgatactaccaattcttatttagcatatggcgtcgaaatttctaaagaacaggaatataaaattagatataaggttgcagctaacgagaattctaaaatcagtctttcacatagaaaacctggtggtaactatgcaaaaatagatgacactactattcctattactggaaatgcagcggacactgttaaaggagaatatggttcttacaagattgtagaaggccctattgttaagttaacaaaaggtgcacatgatttgaaattggaaaattcacaaggtaaattctccttagatcaaattgaattagaacctgtggaacgggatcaagtgatagcgcgggataattttgacgatcaacggttaaattggattaacctaggtggtattgtaaatggaggtatcacagggaaagctggtatgattggtacaaatggagatacttggacttatattcaagatcaagtattaccattctctaaatataccttgagtataaaagtgaaattgaattccaatgatggaaatgagcgacaaaaggtaacgatattcacagataatttgaaacatgagcgaataacaaaaacagtcgagcttaaggggaaagcaggctatcaagaaatacaactagaatttattacaagtagggatttagcaaacactcatgttgggattctaacgtcaaatggaacatctaatgtattatttgatgatgtccaagttataggtgcaaaaaaaagctaa

SEQ ID NO: 150 - protein, 443 aa, Bacillus sp.
  misc_feature: SGI Peptide ID NO. AGRMET1T218366
  misc_feature (166)..(303): Pfam Id: PF03944 Pfam Desc: delta endotoxin
  misc_feature (183)..(299): Pfam Id: PF03422 Pfam Desc: Carbohydrate binding module (family 6)
  misc_feature (1)..(443): NCBI GI: 229065811 Blast Desc: 83-kDa crystal protein [Bacillus cereus AH603] gi|228715456|gb|EEL67276.1| 83-kDa crystal protein [Bacillus cereus AH603]
  misc_feature (1)..(442): NCBI GI: 308756031 Blast Desc: cry protein [Bacillus thuringiensis]
  misc_feature (15)..(302): NCBI GI: 260268368 Blast Desc: M019CP78B [Bacillus thuringiensis]
  misc_feature (26)..(302): NCBI GI: 260268372 Blast Desc: M019CP78A [Bacillus thuringiensis]
  misc_feature (15)..(302): NCBI GI: 114842165 Blast Desc: [Bacillus thuringiensis]
  misc_feature (15)..(302): NCBI GI: 114842169 Blast Desc: [Bacillus thuringiensis]
  misc_feature (15)..(302): NCBI GI: 88687362 Blast Desc: Cry31-like 82-kDa protein [Bacillus thuringiensis]
  misc_feature (26)..(302): NCBI GI: 37543234 Blast Desc: 83-KDa crystal protein [Bacillus thuringiensis]
  misc_feature (106)..(302): NCBI GI: 9798640 Blast Desc: 81-kDa leukemia toxin [Bacillus thuringiensis] gi|88687360|dbj|BAE79808.1| Cry31-like 81-kDa protein [Bacillus thuringiensis]
  misc_feature (106)..(302): NCBI GI: 114842167 Blast Desc: [Bacillus thuringiensis]
  misc_feature: Useful for conferring pesticidal activity to an organism
  misc_feature: Useful for controlling a pest organism
GTGEGTTWENIQKILDSQEYKGDLHKLDIRSFDRIDAIQPWFSDKQNGGSNWTTPGWTGNTSGGALKTLINPSDNPITRVKAQSSRTPNYIDFKFDTGGDNPYFGRYFSGGSYKEDIFEYPNQKLSQIHAFNRSTYPGFEGIDAVVFGFVDKNLTQSSTYLMTNMITTIPAAKYNRGMSNFQPQVESIHAKQKAMKTDTTNSYLAYGVEISKEQEYKIRYKVAANENSKISLSHRKPGGNYAKIDDTTIPITGNAADTVKGEYGSYKIVEGPIVKLTKGAHDLKLENSQGKFSLDQIELEPVERDQVIARDNFDDQRLNWINLGGIVNGGITGKAGMIGTNGDTWTYIQDQVLPFSKYTLSIKVKLNSNDGNERQKVTIFTDNLKHERITKTVELKGKAGYQEIQLEFITSRDLANTHVGILTSNGTSNVLFDDVQVIGAKKS

SEQ ID NO: 151 - DNA, 1686 bp, Bacillus sp.
  misc_feature: SGI cDNA ID NO. AGRMET1G218673
  misc_feature: Encodes the peptide sequence at SEQ ID NO. 152
  misc_feature: Useful for conferring pesticidal activity to an organism
  misc_feature: Useful for controlling a pest organism
gtgaaatataaaaatcgaaaacgaacccaacgtaaatacaaacaaacattagttgcgaccgttgcagtaatgactttaggtttaagcataggagaaagttttactatgcccagttttgcatatgctactgcagattcagtgaaatcaagagaacaacaagtaaaagagtgggacgagaaacaagataaacaagctgcattcgataaaatgcaaaatgatgctcaggcaactttagcagatatagatgcgttacaaaaaaaagttacagttgtggatacaataacaggtgctataaacgtcattggtagtgccggagatcagttagctttattgaataaatattccgactttgtaaaattagcagtaacaggtaatgttagtcctcaagctattaatcaagtgttaaagggggtagcaacaacaggtgcatcattgattccgggtgcaggaccatttgttagtcagattcttagtgtggcatggccgaatcttggtgttggtggaccaagtcagatggaaataataatgacagaagtaactaaattaatagatgcatcaatccaagcttatgataaagacactattagaggagatatgaaaaatttatatgatgagttaaatgtcttagaaagtttattaaacaaaaaaacagaagttggaatgcctaatggtaacgttcaggcttctgcaataaatgctgtgtcatatataaaatctgttgatggtagactaaaagatcttgtagagcattgtcgaaaaccaagtcaagcggaaacagaacttccattctttactattgcagcgactgctcgtttacaatttttaaaatttattaaagcggaaggattaaaacttaacattggttttgatgaaaaggatatccaaggctatgcaggtgatttagaaagtttaactaaagaatatagagattatataaataaaacatctgacactgcacaacaaaagatgtacgataatgctaaaaaaatcataagtggtggtctaaaagattatagcggttatagtattaatccgaaagaagaagcagataagataaattctatagctgcaagtggggctattccaagttcaacacaaaccggaattccatcagcgggtagtccagcaactcaatatttaaaagcaattgagttaatgaacaactatgatatgttaacaaaaaataatgaagcgtttaatatcattgctaactcaattagtaagcctacagcactagaaatgccacaatttgtatctattaaggcaaaaggaaaaaataaatttgttcatacgtatgatcagcctggtaagccccatttagatgctaattctaatgaagtaggggattgggaaaaattcgaattagtaaccataaataaaaataaccgtatatacgcattaaaagcaaacgcaggaaaaaatgaaaattttgtaacatttaatactacattagacaatcgaggtggaatgttatccactggcaatagtccaacaacgaccactaatagagaatatttcacattaatcccattaggtggagatgactacgcgataagagggtttgagtttggtaattatgttttcgctgactttaacagtggtggggttttagtttcagccagtaaacatattggtgattgggaagttttcacaattaagccatataaaaaaggtgagaaagcttaa

SEQ ID NO: 152 - protein, 561 aa, Bacillus sp.
  misc_feature: SGI Peptide ID NO. AGRMET1T218673
  misc_feature (138)..(315): Pfam Id: PF03945 Pfam Desc: delta endotoxin, N-terminal domain
  misc_feature (114)..(323): NCBI GI: 228911584 Blast Desc: Pesticidal crystal protein cry1Bc [Bacillus thuringiensis IBL 200] gi|8927997|sp|Q9XDL1.1|CR1ID_BACTU RecName: Full=Pesticidal crystal protein cry1Id; AltName: Full=81
  misc_feature (135)..(330): NCBI GI: 229065811 Blast Desc: 83-kDa crystal protein [Bacillus cereus AH603] gi|228715456|gb|EEL67276.1| 83-kDa crystal protein [Bacillus cereus AH603]
  misc_feature (408)..(552): NCBI GI: 330819588 Blast Desc: bgla_2g04620 [Burkholderia gladioli BSR3] gi|327371583|gb|AEA62938.1| bgla_2g04620 [Burkholderia gladioli BSR3]
  misc_feature (419)..(553): NCBI GI: 154483333 Blast Desc: EUBVEN_01036 [Eubacterium ventriosum ATCC 27560] gi|149735843|gb|EDM51729.1| EUBVEN_01036 [Eubacterium ventriosum ATCC 27560]
  misc_feature (125)..(308): NCBI GI: 330822542 Blast Desc: DICPUDRAFT_156331 [Dictyostelium purpureum] gi|325078087|gb|EGC31758.1| DICPUDRAFT_156331 [Dictyostelium purpureum]
  misc_feature (151)..(323): NCBI GI: 158021540 Blast Desc: insecticidal crystal protein [Bacillus thuringiensis]
  misc_feature (114)..(318): NCBI GI: 301641366 Blast Desc: delta endotoxin [Bacillus thuringiensis]
  misc_feature: Useful for conferring pesticidal activity to an organism
  misc_feature: Useful for controlling a pest organism
MKYKNRKRTQRKYKQTLVATVAVMTLGLSIGESFTMPSFAYATADSVKSREQQVKEWDEKQDKQAAFDKMQNDAQATLADIDALQKKVTVVDTITGAINVIGSAGDQLALLNKYSDFVKLAVTGNVSPQAINQVLKGVATTGASLIPGAGPFVSQILSVAWPNLGVGGPSQMEIIMTEVTKLIDASIQAYDKDTIRGDMKNLYDELNVLESLLNKKTEVGMPNGNVQASAINAVSYIKSVDGRLKDLVEHCRKPSQAETELPFFTIAATARLQFLKFIKAEGLKLNIGFDEKDIQGYAGDLESLTKEYRDYINKTSDTAQQKMYDNAKKIISGGLKDYSGYSINPKEEADKINSIAASGAIPSSTQTGIPSAGSPATQYLKAIELMNNYDMLTKNNEAFNIIANSISKPTALEMPQFVSIKAKGKNKFVHTYDQPGKPHLDANSNEVGDWEKFELVTINKNNRIYALKANAGKNENFVTFNTTLDNRGGMLSTGNSPTTTTNREYFTLIPLGGDDYAIRGFEFGNYVFADFNSGGVLVSASKHIGDWEVFTIKPYKKGEKA

SEQ ID NO: 153 - DNA, 830 bp, Bacillus sp.
  misc_feature: SGI cDNA ID NO. AGRMET1G218582
  misc_feature: Encodes the peptide sequence at SEQ ID NO. 154
  misc_feature: Useful for conferring pesticidal activity to an organism
  misc_feature: Useful for controlling a pest organism
atgatgtcaaatgaaaataataacggggaaaatacgaatacatctatgagaagtgatgaggattctattctaagtgaagtcctaaaaagtggtaagcaaatatcgtttcctgattttaatttttataaaatccgtacattttgcggtaaatatgttgatatacaagatggaggtacaggtaactcgaaacttgcagtacaatacacggggaacaacagtgataatcaaagattcgtgatttacactcttgataataattattctgtaattgctgcaaaacatagtgggaaagtgttggatgtaagttatgcgcattttcctgggatacctaatttgcatcttcttatacagtatgattttcaaaacggagataatcaaaagttttttatagcaaatgatggagtgtttgctataaaaaaagatcagaaagtatgggatgtacgggatgggtcaactcagaatagtatacctattataccctatagttatacagggaattcaaatcaaaaattcacgcttgaaaaatcaggttctttcaccattaataaaccagctgtaggtaatttacctcctgctcctgattttcaaactaatgatttaagtgaagaattaccggatgacacaccaccagttattacacatgcaacatatataccttatttcatggtaaaagatccttattataatgcacaacaaaaaatcaaaaattcgccttactatattttagtacgaagacaatattgggagaaagtaactcaaagaaaactagcaccaagtgatacacatgactatatggaaagaactggcgtttctagaacagatcaaacttc

SEQ ID NO: 154 - protein, 276 aa, Bacillus sp.
  misc_feature: SGI Peptide ID NO. AGRMET1T218582
  misc_feature (183)..(276): Pfam Id: PF05431 Pfam Desc: Insecticidal Crystal Toxin, P42
  misc_feature (48)..(171): Pfam Id: PF00652 Pfam Desc: Ricin-type beta-trefoil lectin domain
  misc_feature (19)..(276): NCBI GI: 228911944 Blast Desc: 41.9 kDa insecticidal toxin [Bacillus thuringiensis IBL 200] gi|228847693|gb|EEM92619.1| 41.9 kDa insecticidal toxin [Bacillus thuringiensis IBL 200]
  misc_feature (50)..(275): NCBI GI: 229170564 Blast Desc: 41.9 kDa insecticidal toxin [Bacillus cereus AH621] gi|228612913|gb|EEK70090.1| 41.9 kDa insecticidal toxin [Bacillus cereus AH621]
  misc_feature (53)..(275): NCBI GI: 229100569 Blast Desc: 41.9 kDa insecticidal toxin [Bacillus cereus Rock3-29] gi|229106953|ref|ZP_04237053.1| 41.9 kDa insecticidal toxin [Bacillus cereus Rock3-28] gi|229119132|ref|ZP_04248459.1| 41.9
  misc_feature (41)..(181): NCBI GI: 291009517 Blast Desc: alpha-glucosidase [Saccharopolyspora erythraea NRRL 2338]
  misc_feature (56)..(275): NCBI GI: 156711538 Blast Desc: Cry49Aa protein [Lysinibacillus sphaericus] gi|156711542|emb|CAJ86543.1| Cry49Aa protein [Lysinibacillus sphaericus] gi|156711544|emb|CAJ86544.1| Cry49Aa protein Crystal
  misc_feature (56)..(275): NCBI GI: 156711540 Blast Desc: Cry49Aa protein [Lysinibacillus sphaericus]
  misc_feature (41)..(191): NCBI GI: 307592079 Blast Desc: Ricin B lectin [Cyanothece sp. PCC 7822] gi|306985724|gb|ADN17604.1| Ricin B lectin [Cyanothece sp. PCC 7822]
  misc_feature (48)..(175): NCBI GI: 55377121 Blast Desc: alpha-glucosidase [Haloarcula marismortui ATCC 43049] gi|55229846|gb|AAV45265.1| alpha-glucosidase [Haloarcula marismortui ATCC 43049]
  misc_feature (48)..(190): NCBI GI: 328886791 Blast Desc: Alpha-L-arabinofuranosidase II precursor [Streptomyces venezuelae ATCC 10712]
  misc_feature (49)..(173): NCBI GI: 291009517 Blast Desc: alpha-glucosidase [Saccharopolyspora erythraea NRRL 2338]
  misc_feature: Useful for conferring pesticidal activity to an organism
  misc_feature: Useful for controlling a pest organism
MMSNENNNGENTNTSMRSDEDSILSEVLKSGKQISFPDFNFYKIRTFCGKYVDIQDGGTGNSKLAVQYTGNNSDNQRFVIYTLDNNYSVIAAKHSGKVLDVSYAHFPGIPNLHLLIQYDFQNGDNQKFFIANDGVFAIKKDQKVWDVRDGSTQNSIPIIPYSYTGNSNQKFTLEKSGSFTINKPAVGNLPPAPDFQTNDLSEELPDDTPPVITHATYIPYFMVKDPYYNAQQKIKNSPYYILVRRQYWEKVTQRKLAPSDTHDYMERTGVSRTDQT

SEQ ID NO: 155 - DNA, 817 bp, Bacillus sp.
  misc_feature: SGI cDNA ID NO. AGRMET1G218580
  misc_feature: Encodes the peptide sequence at SEQ ID NO. 156
  misc_feature: Useful for conferring pesticidal activity to an organism
  misc_feature: Useful for controlling a pest organism
gtgatgtcaaatgaaaataataacggggaaaatacgaatacatctatgagaaatgatgaagattctattctaagtgaggtcctaaaaagtggtaagcaaatatcttttcctgattttaatttttataaaattcgtacattttgtggtaaatatattgatatacaagatggatctactgctaacgaaaaagtcgcttttcaatatactgtgaataataatgataatcaaagattcctaattttcacccttgataataattattctgtaattgctgcaaagcatagtggaaaagtgctggatattatggacttaccaatttttccgggtcttccgtttatgcttatacaatacgactttcaaaacggagataatcaaaagtttttaatagcaaatgaaggagcgattgcagtaaaaaaaacaggacaggtatgggatgtagcgagcggatcaactaaagataaaacaccaattataccctataattattcaggggcttcaaatcaaaaatttaagctagaaccatctggagcagcttccgttaaaccaccagaatttggtactttacctaatgcccctgattttataacaaatgatataaatgaagaattaccggatgacacaccaccagttattacacatgctacatatatgccttatttcatggtaaaagacccttattacaatgcacaacaaaaaatcaaaaatacgccttactatattttagtacgaagacaatattggcagaaagtaactcaaagaatactagcaccaagtgatacatatgactatacggaaacaactggggtttctagaacag

SEQ ID NO: 156 - protein, 272 aa, Bacillus sp.
  misc_feature: SGI Peptide ID NO. AGRMET1T218580
  misc_feature (183)..(271): Pfam Id: PF05431 Pfam Desc: Insecticidal Crystal Toxin, P42
  misc_feature (48)..(170): Pfam Id: PF00652 Pfam Desc: Ricin-type beta-trefoil lectin domain
  misc_feature (18)..(272): NCBI GI: 228911944 Blast Desc: 41.9 kDa insecticidal toxin [Bacillus thuringiensis IBL 200] gi|228847693|gb|EEM92619.1| 41.9 kDa insecticidal toxin [Bacillus thuringiensis IBL 200]
  misc_feature (50)..(272): NCBI GI: 229170564 Blast Desc: 41.9 kDa insecticidal toxin [Bacillus cereus AH621] gi|228612913|gb|EEK70090.1| 41.9 kDa insecticidal toxin [Bacillus cereus AH621]
  misc_feature (53)..(271): NCBI GI: 229100569 Blast Desc: 41.9 kDa insecticidal toxin [Bacillus cereus Rock3-29] gi|229106953|ref|ZP_04237053.1| 41.9 kDa insecticidal toxin [Bacillus cereus Rock3-28] gi|229119132|ref|ZP_04248459.1| 41.9
  misc_feature (41)..(185): NCBI GI: 307592079 Blast Desc: Ricin B lectin [Cyanothece sp. PCC 7822] gi|306985724|gb|ADN17604.1| Ricin B lectin [Cyanothece sp. PCC 7822]
  misc_feature (41)..(176): NCBI GI: 291009517 Blast Desc: alpha-glucosidase [Saccharopolyspora erythraea NRRL 2338]
  misc_feature (49)..(177): NCBI GI: 238064348 Blast Desc: xylanase-arabinofuranosidase bifunctional enzyme [Micromonospora sp. ATCC 39149] gi|237886159|gb|EEP74987.1| xylanase-arabinofuranosidase bifunctional enzyme [Micromonospora
  misc_feature (34)..(172): NCBI GI: 159897953 Blast Desc: Ricin B lectin [Herpetosiphon aurantiacus DSM 785] gi|159890992|gb|ABX04072.1| Ricin B lectin [Herpetosiphon aurantiacus DSM 785]
  misc_feature (48)..(173): NCBI GI: 55377121 Blast Desc: alpha-glucosidase [Haloarcula marismortui ATCC 43049] gi|55229846|gb|AAV45265.1| alpha-glucosidase [Haloarcula marismortui ATCC 43049]
  misc_feature (44)..(176): NCBI GI: 291009517 Blast Desc: alpha-glucosidase [Saccharopolyspora erythraea NRRL 2338]
  misc_feature (49)..(170): NCBI GI: 300784280 Blast Desc: beta-xylosidase [Amycolatopsis mediterranei U32] gi|299793794|gb|ADJ44169.1| beta-xylosidase [Amycolatopsis mediterranei U32] gi|340525699|gb|AEK40904.1| beta-xylosidase
  misc_feature: Useful for conferring pesticidal activity to an organism
  misc_feature: Useful for controlling a pest organism
MMSNENNNGENTNTSMRNDEDSILSEVLKSGKQISFPDFNFYKIRTFCGKYIDIQDGSTANEKVAFQYTVNNNDNQRFLIFTLDNNYSVIAAKHSGKVLDIMDLPIFPGLPFMLIQYDFQNGDNQKFLIANEGAIAVKKTGQVWDVASGSTKDKTPIIPYNYSGASNQKFKLEPSGAASVKPPEFGTLPNAPDFITNDINEELPDDTPPVITHATYMPYFMVKDPYYNAQQKIKNTPYYILVRRQYWQKVTQRILAPSDTYDYTETTGVSRT

SEQ ID NO: 157 - DNA, 332 bp, Bacillus sp.
  misc_feature: SGI cDNA ID NO. AGRMET1G697805
  misc_feature: Encodes the peptide sequence at SEQ ID NO. 158
  misc_feature: Useful for conferring pesticidal activity to an organism
  misc_feature: Useful for controlling a pest organism
aatcagttgagaaaaaaatggggaatggatacaaatcaatggcaaggatacaaggataatcagaaaaaactgattcaagaatatacgaattatgctatgaaagtatataacgatggtttggaaaaaaggaaaaaagaagctgaagagattaatacgcaacaaccaaatagaaatactgacagatggaatcatattaataattatgtaagggaatacacattaagtgttttagactttgtagatttgttcccagcaacaaatcctgaaacatattctaaaggcttaatgcaagaaaattctaggcaaatttattcttctattaaaggcgcagt

SEQ ID NO: 158 - protein, 110 aa, Bacillus sp.
  misc_feature: SGI Peptide ID NO. AGRMET1T697805
  misc_feature (4)..(89): Pfam Id: PF03945 Pfam Desc: delta endotoxin, N-terminal domain
  misc_feature (5)..(110): NCBI GI: 229065811 Blast Desc: 83-kDa crystal protein [Bacillus cereus AH603] gi|228715456|gb|EEL67276.1| 83-kDa crystal protein [Bacillus cereus AH603]
  misc_feature (5)..(110): NCBI GI: 308756031 Blast Desc: cry protein [Bacillus thuringiensis]
  misc_feature (5)..(107): NCBI GI: 41688283 Blast Desc: mosquitocidal toxin [Bacillus thuringiensis serovar entomocidus]
  misc_feature (5)..(109): NCBI GI: 51090240 Blast Desc: Cry protein [Bacillus thuringiensis]
  misc_feature (7)..(105): NCBI GI: 8469161 Blast Desc: CR3CA_BACTK RecName: Full=Pesticidal crystal protein cry3Ca; AltName: Full=73 kDa crystal protein; AltName: Full=Crystaline entomocidal protoxin; AltName: Full=Insecticidal
  misc_feature (5)..(105): NCBI GI: 2815886 Blast Desc: delta-endotoxin [Bacillus thuringiensis]
  misc_feature (5)..(105): NCBI GI: 8469157 Blast Desc: CR9DA_BACTP RecName: Full=Pesticidal crystal protein cry9Da; AltName: Full=132 kDa crystal protein; AltName: Full=Crystaline entomocidal protoxin; AltName: Full=Insecticidal
  misc_feature (11)..(107): NCBI GI: 228904964 Blast Desc: Pesticidal crystal protein cry10Aa [Bacillus thuringiensis IBL 4222] gi|228854675|gb|EEM99282.1| Pesticidal crystal protein cry10Aa [Bacillus thuringiensis IBL 4222]
  misc_feature (11)..(107): NCBI GI: 161598578 Blast Desc: pesticidial crystal protein cry10AA [Bacillus thuringiensis serovar israelensis] gi|21685444|emb|CAD30098.1| pesticidial crystal protein cry10AA [Bacillus thuringiensis
  misc_feature (11)..(107): NCBI GI: 117329 Blast Desc: C10AA_BACTI RecName: Full=Pesticidal crystal protein cry10Aa; AltName: Full=78 kDa crystal protein; AltName: Full=Crystaline entomocidal protoxin; AltName: Full=Insecticidal
  misc_feature: Useful for conferring pesticidal activity to an organism
  misc_feature: Useful for controlling a pest organism
NQLRKKWGMDTNQWQGYKDNQKKLIQEYTNYAMKVYNDGLEKRKKEAEEINTQQPNRNTDRWNHINNYVREYTLSVLDFVDLFPATNPETYSKGLMQENSRQIYSSIKGA

SEQ ID NO: 159 - DNA, 284 bp, Bacillus sp.
  misc_feature: SGI cDNA ID NO. AGRMET1G697793
  misc_feature: Encodes the peptide sequence at SEQ ID NO. 160
  misc_feature: Useful for conferring pesticidal activity to an organism
  misc_feature: Useful for controlling a pest organism
tcaggaggggatttaataaaaggatctaggagcttgggggaaattcaattaactccacctcgtgatgcacacaacaaaaagtatcgtttgagaattcgctatgccgctgattcaaaagatttacttacaatgactttttactctggtagtggaccagctaaacatcaaatgctctatcaagcaacaatgcaaaaaggggattctttcaaatataattcctttcaatatgtagaaaaagtagtatatatttcgtctggtataagaggcataaacctcagtgcagg

SEQ ID NO: 160 - protein, 94 aa, Bacillus sp.
  misc_feature: SGI Peptide ID NO. AGRMET1T697793
  misc_feature (2)..(79): Pfam Id: PF03944 Pfam Desc: delta endotoxin
  misc_feature (1)..(94): NCBI GI: 163943265 Blast Desc: Delta endotoxin central region subgroup 1 [Bacillus weihenstephanensis KBAB4] gi|163865462|gb|ABY46520.1| Delta endotoxin central region subgroup 1 [Bacillus weihenstephanensis
  misc_feature (1)..(77): NCBI GI: 228988837 Blast Desc: bthur0001_54740 [Bacillus thuringiensis serovar tochigiensis BGSC 4Y1] gi|228770896|gb|EEM19403.1| bthur0001_54740 [Bacillus thuringiensis serovar tochigiensis BGSC
  misc_feature: Useful for conferring pesticidal activity to an organism
  misc_feature: Useful for controlling a pest organism
SGGDLIKGSRSLGEIQLTPPRDAHNKKYRLRIRYAADSKDLLTMTFYSGSGPAKHQMLYQATMQKGDSFKYNSFQYVEKVVYISSGIRGINLSA

SEQ ID NO: 161 - DNA, 268 bp, Bacillus sp.
  misc_feature: SGI cDNA ID NO. AGRMET1G697907
  misc_feature: Encodes the peptide sequence at SEQ ID NO. 162
  misc_feature: Useful for conferring pesticidal activity to an organism
  misc_feature: Useful for controlling a pest organism
tacaacgagcaaaacaagtgtggggagaaaataggatcggaattaatatcacctactaatatttatgaaggtcgattaaaagagaaaatagcacagtataccaatcattgtgtatattggtatcagacgggattaaatcagataaaagaggcgggtacaagtgctgaaaattggttgaaatttaataaatttcgtagagaaatgacgttggcggtattggatattatctctatctttccaacttatgattttgagaactatccaatac

SEQ ID NO: 162 - protein, 89 aa, Bacillus sp.
  misc_feature: SGI Peptide ID NO. AGRMET1T697907
  misc_feature (17)..(85): Pfam Id: PF03945 Pfam Desc: delta endotoxin, N-terminal domain
  misc_feature (9)..(87): NCBI GI: 31745044 Blast Desc: mosquitocidal toxin [Bacillus thuringiensis serovar aizawai]
  misc_feature (7)..(89): NCBI GI: 193089942 Blast Desc: toxin protein [Bacillus thuringiensis]
  misc_feature (8)..(89): NCBI GI: 16945772 Blast Desc: mosquitocidal toxin [Bacillus thuringiensis serovar aizawai]
  misc_feature (22)..(89): NCBI GI: 239638225 Blast Desc: cry4 delta-toxin-like protein [Bacillus thuringiensis]
  misc_feature (20)..(89): NCBI GI: 194272337 Blast Desc: delta-endotoxin [Bacillus thuringiensis]
  misc_feature (20)..(89): NCBI GI: 78191077 Blast Desc: Snun8-1 [Bacillus thuringiensis]
  misc_feature (20)..(89): NCBI GI: 67973231 Blast Desc: Cry8 [Bacillus thuringiensis]
  misc_feature (15)..(89): NCBI GI: 134274695 Blast Desc: pesticidal crystal protein cry24-like [Bacillus thuringiensis]
  misc_feature (20)..(89): NCBI GI: 34495248 Blast Desc: Cry8Ea1 [Bacillus thuringiensis]
  misc_feature (20)..(89): NCBI GI: 158021542 Blast Desc: crystal protein [Bacillus thuringiensis]
  misc_feature: Useful for conferring pesticidal activity to an organism
  misc_feature: Useful for controlling a pest organism
YNEQNKCGEKIGSELISPTNIYEGRLKEKIAQYTNHCVYWYQTGLNQIKEAGTSAENWLKFNKFRREMTLAVLDIISIFPTYDFENYPI

SEQ ID NO: 163 - DNA, 549 bp, Bacillus sp.
  misc_feature: SGI cDNA ID NO. AGRMET1G166424
  misc_feature: Encodes the peptide sequence at SEQ ID NO. 164
  misc_feature: Useful for conferring pesticidal activity to an organism
  misc_feature: Useful for controlling a pest organism
aagataaatatgaatatgaattttgatttcgaggatcatgaaaataagaatttatctgtgcaggaggaacatcaccattgtagtgaaggaggggaacataaaatagcattttgttgtgtagtctcaattccaaaaggttttaaatatgttgcccattgtgatccgaaatttgtatataaccttgattgtctatccgtttcaaaagaaaaatgccgtaaggttgttcctatagaaggatgtggatgtgcagaggtagatttacatgtattaaaggtaaagggatgcatctcatttgtatcgaatatagaaatagaacctattcatgaatgcatgacctgctcagcaaatccacataaagaaaacattgctgtgagttgccaagatactgtctgcgtagatcaagttttgtattgcagtgtagattgtttgccagattgtgatattaattgtgataatgtaaaaatttgcgatgtgagcattgaaccaattggagattgtgattgtcacgcggtgaaaattaaagggaaattttcacttcactataaataa

SEQ ID NO: 164 - protein, 182 aa, Bacillus sp.
  misc_feature: SGI Peptide ID NO. AGRMET1T166424
  misc_feature (21)..(182): Pfam Id: PF07029 Pfam Desc: CryBP1 protein
  misc_feature (4)..(182): NCBI GI: 161598561 Blast Desc: 19kda accessory protein [Bacillus thuringiensis serovar israelensis] gi|228905288|ref|ZP_04069273.1| 19kDa accessory protein [Bacillus thuringiensis IBL 4222] 19kDa protein
  misc_feature (4)..(170): NCBI GI: 999364 Blast Desc: P19 [Bacillus thuringiensis]
  misc_feature (15)..(179): NCBI GI: 228988982 Blast Desc: bthur0001_56040 [Bacillus thuringiensis serovar tochigiensis BGSC 4Y1] gi|228770744|gb|EEM19278.1| bthur0001_56040 [Bacillus thuringiensis serovar tochigiensis BGSC
  misc_feature (4)..(179): NCBI GI: 169825570 Blast Desc: Bsph_p156 [Lysinibacillus sphaericus C3-41] gi|169828675|ref|YP_001698833.1| Bsph_3194 [Lysinibacillus sphaericus C3-41] gi|168993163|gb|ACA40703.1| Hypothetical C3-41]
  misc_feature (4)..(180): NCBI GI: 46359601 Blast Desc: [Paenibacillus lentimorbus]
  misc_feature (21)..(179): NCBI GI: 228950176 Blast Desc: bthur0007_62450 [Bacillus thuringiensis serovar monterrey BGSC 4AJ1] gi|228809515|gb|EEM55954.1| bthur0007_62450 [Bacillus thuringiensis serovar monterrey BGSC 4AJ1]
  misc_feature (4)..(179): NCBI GI: 194248254 Blast Desc: [Lysinibacillus sphaericus]
  misc_feature (15)..(180): NCBI GI: 228911457 Blast Desc: bthur0013_55920 [Bacillus thuringiensis IBL 200] gi|228848203|gb|EEM93059.1| bthur0013_55920 [Bacillus thuringiensis IBL 200]
  misc_feature (27)..(179): NCBI GI: 228989191 Blast Desc: bthur0001_58030 [Bacillus thuringiensis serovar tochigiensis BGSC 4Y1] gi|228770540|gb|EEM19089.1| bthur0001_58030 [Bacillus thuringiensis serovar tochigiensis BGSC
  misc_feature (15)..(180): NCBI GI: 228911578 Blast Desc: bthur0013_57080 [Bacillus thuringiensis IBL 200] gi|228848081|gb|EEM92946.1| bthur0013_57080 [Bacillus thuringiensis IBL 200]
  misc_feature: Useful for conferring pesticidal activity to an organism
  misc_feature: Useful for controlling a pest organism
KINMNMNFDFEDHENKNLSVQEEHHHCSEGGEHKIAFCCVVSIPKGFKYVAHCDPKFVYNLDCLSVSKEKCRKVVPIEGCGCAEVDLHVLKVKGCISFVSNIEIEPIHECMTCSANPHKENIAVSCQDTVCVDQVLYCSVDCLPDCDINCDNVKICDVSIEPIGDCDCHAVKIKGKFSLHYK

SEQ ID NO: 165 - DNA, 225 bp, Bacillus sp.
  misc_feature: SGI cDNA ID NO. AGRMET1G697865
  misc_feature: Encodes the peptide sequence at SEQ ID NO. 166
  misc_feature: Useful for conferring pesticidal activity to an organism
  misc_feature: Useful for controlling a pest organism
actatgattagaactaatactaacgcaacatggaatatgtataatacttaccgtttagaaatgactctaactgtgttagatcttattgctatttttccaaattatgacccagaaaaatatccaataggagttaaatctgaacttatcagagaagtttatacgaatgtcaattcagatacatttagaaccataacagaactagaaaatggattaactagaaatcct

SEQ ID NO: 166 - protein, 75 aa, Bacillus sp.
  misc_feature: SGI Peptide ID NO. AGRMET1T697865
  misc_feature (3)..(38): Pfam Id: PF03945 Pfam Desc: delta endotoxin, N-terminal domain
  misc_feature (44)..(75): Pfam Id: PF00555 Pfam Desc: delta endotoxin
  misc_feature (1)..(75): NCBI GI: 228904964 Blast Desc: Pesticidal crystal protein cry10Aa [Bacillus thuringiensis IBL 4222] gi|228854675|gb|EEM99282.1| Pesticidal crystal protein cry10Aa [Bacillus thuringiensis IBL 4222]
  misc_feature (1)..(75): NCBI GI: 117329 Blast Desc: C10AA_BACTI RecName: Full=Pesticidal crystal protein cry10Aa; AltName: Full=78 kDa crystal protein; AltName: Full=Crystaline entomocidal protoxin; AltName: Full=Insecticidal
  misc_feature (1)..(75): NCBI GI: 161598578 Blast Desc: pesticidial crystal protein cry10AA [Bacillus thuringiensis serovar israelensis] gi|21685444|emb|CAD30098.1| pesticidial crystal protein cry10AA [Bacillus thuringiensis
  misc_feature (1)..(75): NCBI GI: 159141832 Blast Desc: Cry4c [Bacillus thuringiensis]
  misc_feature (1)..(75): NCBI GI: 159141836 Blast Desc: Cry4c [Bacillus thuringiensis]
  misc_feature (1)..(75): NCBI GI: 159141834 Blast Desc: Cry4c [Bacillus thuringiensis]
  misc_feature (1)..(75): NCBI GI: 159141830 Blast Desc: Cry4c [Bacillus thuringiensis]
  misc_feature (1)..(75): NCBI GI: 159141840 Blast Desc: Cry4c [Bacillus thuringiensis]
  misc_feature (1)..(75): NCBI GI: 159141838 Blast Desc: Cry4c [Bacillus thuringiensis]
  misc_feature (2)..(75): NCBI GI: 169261091 Blast Desc: insecticidal crystal protein Cry54Aa [Bacillus thuringiensis]
  misc_feature: Useful for conferring pesticidal activity to an organism
  misc_feature: Useful for controlling a pest organism
TMIRTNTNATWNMYNTYRLEMTLTVLDLIAIFPNYDPEKYPIGVKSELIREVYTNVNSDTFRTITELENGLTRNP

SEQ ID NO: 167 - DNA, 152 bp, Bacillus sp.
  misc_feature: SGI cDNA ID NO. AGRMET1G697862
  misc_feature: Encodes the peptide sequence at SEQ ID NO. 168
  misc_feature: Useful for conferring pesticidal activity to an organism
  misc_feature: Useful for controlling a pest organism
ttgaaaggtaccacttctaaaagttggctgaattatcatcagttccgtagagagatgacattactggtattagatttggtggcgttatttccaaactatgacacacatatgtatccaatcgaaacaacagctcaacttacacgggatgtgta

SEQ ID NO: 168 - protein, 50 aa, Bacillus sp.
  misc_feature: SGI Peptide ID NO. AGRMET1T697862
  misc_feature (2)..(36): Pfam Id: PF03945 Pfam Desc: delta endotoxin, N-terminal domain
  misc_feature (1)..(50): NCBI GI: 8928018 Blast Desc: CR8AA_BACUK RecName: Full=Pesticidal crystal protein cry8Aa; AltName: Full=131 kDa crystal protein; AltName: Full=Crystaline entomocidal protoxin; AltName: Full=Insecticidal
  misc_feature (1)..(50): NCBI GI: 22122188 Blast Desc: cry8 [Bacillus thuringiensis serovar galleriae]
  misc_feature (1)..(50): NCBI GI: 295039398 Blast Desc: Cry8Da protein [Bacillus thuringiensis serovar galleriae]
  misc_feature (1)..(50): NCBI GI: 295039400 Blast Desc: Cry8Da protein [Bacillus thuringiensis serovar galleriae]
  misc_feature (1)..(50): NCBI GI: 295039406 Blast Desc: Cry8Da protein [Bacillus thuringiensis serovar galleriae]
  misc_feature (1)..(50): NCBI GI: 160420050 Blast Desc: Cry8Dlike [Bacillus thuringiensis]
  misc_feature (1)..(50): NCBI GI: 295039404 Blast Desc: Cry8Da protein [Bacillus thuringiensis serovar galleriae]
  misc_feature (1)..(50): NCBI GI: 295039402 Blast Desc: Cry8Da protein [Bacillus thuringiensis serovar galleriae]
  misc_feature (1)..(50): NCBI GI: 158021540 Blast Desc: insecticidal crystal protein [Bacillus thuringiensis]
  misc_feature (1)..(50): NCBI GI: 272682862 Blast Desc: Cry1-like delta-endotoxin [Bacillus thuringiensis]
  misc_feature: Useful for conferring pesticidal activity to an organism
  misc_feature: Useful for controlling a pest organism
MKGTTSKSWLNYHQFRREMTLLVLDLVALFPNYDTHMYPIETTAQLTRDV

SEQ ID NO: 169 - DNA, 816 bp, Bacillus sp.
  misc_feature: SGI cDNA ID NO. AGRMET1G218478
  misc_feature: Encodes the peptide sequence at SEQ ID NO. 170
  misc_feature: Useful for conferring pesticidal activity to an organism
  misc_feature: Useful for controlling a pest organism
atgactttaggagttagtatattaggacctacagcctctgcattcgctgctgaaggagataacatttcagtaatcaaccttgcagagactcaaacgaaaaatactacctcgttattaaacgattggttggacaaactaaaagctgaaatacatattctaaagcctgaaatagaacagctaaagcgggtgggaaaatttacggggactgcagcctctgaattttataaaagtgcaaataaaggccctgaacaagtgaacgatgccttaagggcgataactatagcaagcgctgatatcattccatgtggaggaatgtttgttgctccgataattggtctcctttggccagaagaaaatggggttaattcacagctaaaagcactaagagaagaacttactaagctgatgaaagatgaaattgctaacgaacaacttaacttttttaactctgactttcgatcattacattcagacctaacagatcttgagaacgcagtaaatgctgagaatagtcagaatgctgatgagtacaccaagaatcaacgtggtattcaggcaaataagattgaggggttatttgggaatcttttgtatcatacttcggatgataaacacaaaatagtaaatttacctctatacactcaagttgcgcttgctcatttaatgtttttaaaatcattaagtgatgaagcagtatcttctaaaatgaatattacacagcaaagcttaaaagaactatatacgaaagatggggttaaaacacgtgctaatgattatgtactgcatataatgaaaacatatcatgatgccccataa

SEQ ID NO: 170 - protein, 271 aa, Bacillus sp.
  misc_feature: SGI Peptide ID NO. AGRMET1T218478
  misc_feature (101)..(269): Pfam Id: PF03945 Pfam Desc: delta endotoxin, N-terminal domain
  misc_feature (53)..(270): NCBI GI: 8928020 Blast Desc: C14AA_BACTS RecName: Full=Pesticidal crystal protein cry14Aa; AltName: Full=132 kDa crystal protein; AltName: Full=Crystaline entomocidal protoxin; AltName: Full=Insecticidal
  misc_feature: Useful for conferring pesticidal activity to an organism
  misc_feature: Useful for controlling a pest organism
MTLGVSILGPTASAFAAEGDNISVINLAETQTKNTTSLLNDWLDKLKAEIHILKPEIEQLKRVGKFTGTAASEFYKSANKGPEQVNDALRAITIASADIIPCGGMFVAPIIGLLWPEENGVNSQLKALREELTKLMKDEIANEQLNFFNSDFRSLHSDLTDLENAVNAENSQNADEYTKNQRGIQANKIEGLFGNLLYHTSDDKHKIVNLPLYTQVALAHLMFLKSLSDEAVSSKMNITQQSLKELYTKDGVKTRANDYVLHIMKTYHDAP

SEQ ID NO: 171 - DNA, 413 bp, Bacillus sp.
  misc_feature: SGI cDNA ID NO. AGRMET1G697789
  misc_feature: Encodes the peptide sequence at SEQ ID NO. 172
  misc_feature: Useful for conferring pesticidal activity to an organism
  misc_feature: Useful for controlling a pest organism
ggagaatatgatataacgcctgaaaaatcaaatgattctgtatatcaacaaataacagctccaatctttgtgcaagctgcaaatgctcatctcttattacagagagatatgattttatatggtgaagaatggggaatggataaagatcaatggcaaggatataaggataatcagaaaaaacttattcaagaatatacgaattatgctatgaaagtatataatgatggattggaaaaaaggaaaaaagaagctgaagagattaatacgcaacaaccaaatagaaatactgacagatggaatcatattaatgattatgtaagggaatatacatatggtgtattacctttttcactaacttctttcgctactttatgcatctcttccataagatctgccccgtttggtacaacaat

SEQ ID NO: 172 - protein, 137 aa, Bacillus sp.
  misc_feature: SGI Peptide ID NO. AGRMET1T697789
  misc_feature (11)..(114): Pfam Id: PF03945 Pfam Desc: delta endotoxin, N-terminal domain
  misc_feature (6)..(116): NCBI GI: 229065811 Blast Desc: 83-kDa crystal protein [Bacillus cereus AH603] gi|228715456|gb|EEL67276.1| 83-kDa crystal protein [Bacillus cereus AH603]
  misc_feature (6)..(116): NCBI GI: 308756031 Blast Desc: cry protein [Bacillus thuringiensis]
  misc_feature (21)..(114): NCBI GI: 41688283 Blast Desc: mosquitocidal toxin [Bacillus thuringiensis serovar entomocidus]
  misc_feature (15)..(110): NCBI GI: 2815886 Blast Desc: delta-endotoxin [Bacillus thuringiensis]
  misc_feature (15)..(136): NCBI GI: 8469157 Blast Desc: CR9DA_BACTP RecName: Full=Pesticidal crystal protein cry9Da; AltName: Full=132 kDa crystal protein; AltName: Full=Crystaline entomocidal protoxin; AltName: Full=Insecticidal
  misc_feature (23)..(114): NCBI GI: 51090240 Blast Desc: Cry protein [Bacillus thuringiensis]
  misc_feature (13)..(114): NCBI GI: 284930099 Blast Desc: eCry3.1Ab engineered Bt hybrid insecticidal protein [synthetic construct]
  misc_feature (13)..(114): NCBI GI: 471281 Blast Desc: CryIIIA insecticidal crystal protein [synthetic construct]
  misc_feature (13)..(114): NCBI GI: 58826238 Blast Desc: Cry3 delta endotoxin [Bacillus thuringiensis serovar tenebrionis]
  misc_feature (13)..(114): NCBI GI: 143084 Blast Desc: insect control protein [Bacillus thuringiensis]
  misc_feature: Useful for conferring pesticidal activity to an organism
  misc_feature: Useful for controlling a pest organism
GEYDITPEKSNDSVYQQITAPIFVQAANAHLLLQRDMILYGEEWGMDKDQWQGYKDNQKKLIQEYTNYAMKVYNDGLEKRKKEAEEINTQQPNRNTDRWNHINDYVREYTYGVLPFSLTSFATLCISSIRSAPFGTT

SEQ ID NO: 173 - DNA, 354 bp, Bacillus sp.
  misc_feature: SGI cDNA ID NO. AGRMET1G697804
  misc_feature: Encodes the peptide sequence at SEQ ID NO. 174
  misc_feature: Useful for conferring pesticidal activity to an organism
  misc_feature: Useful for controlling a pest organism
aatcagaaacttaagaatgtagttagggatttcatagatgcggacaaagctttcattgcacttatagaaggggggctatcagaaagtaaagctcaaatattattattgcctatttatgcacaagctgcaaatgtacatttattactattaagagatgcagttcaatataaagaaaaatggggagaattattgggggcggagaaagtaggagaggaattaatatcacctactatggattataacaagcgattaaaagatgcgatagaacagtataccaattattgtgtagagtggtataacaagggtttagatcagataaaacaggcaggtacaagtactgaaacctggttgaaa

SEQ ID NO: 174 - protein, 118 aa, Bacillus sp.
  misc_feature: SGI Peptide ID NO. AGRMET1T697804
  misc_feature (4)..(117): Pfam Id: PF03945 Pfam Desc: delta endotoxin, N-terminal domain
  misc_feature (1)..(118): NCBI GI: 193089942 Blast Desc: toxin protein [Bacillus thuringiensis]
  misc_feature (2)..(118): NCBI GI: 31745044 Blast Desc: mosquitocidal toxin [Bacillus thuringiensis serovar aizawai]
  misc_feature (1)..(118): NCBI GI: 16945772 Blast Desc: mosquitocidal toxin [Bacillus thuringiensis serovar aizawai]
  misc_feature (24)..(118): NCBI GI: 48880 Blast Desc: crystal protein [Bacillus thuringiensis]
  misc_feature (24)..(118): NCBI GI: 8469164 Blast Desc: CR9AA_BACTG RecName: Full=Pesticidal crystal protein cry9Aa; AltName: Full=130 kDa crystal protein; AltName: Full=Crystaline entomocidal protoxin; AltName: Full=Insecticidal
  misc_feature (22)..(118): NCBI GI: 134274695 Blast Desc: pesticidal crystal protein cry24-like [Bacillus thuringiensis]
  misc_feature (6)..(118): NCBI GI: 8928012 Blast Desc: C24AA_BACTJ RecName: Full=Pesticidal crystal protein cry24Aa; AltName: Full=Crystaline entomocidal protoxin; Short=Crystal protein; AltName: Full=Insecticidal delta-endotoxin
  misc_feature (5)..(118): NCBI GI: 50539655 Blast Desc: delta-endotoxin [Bacillus thuringiensis]
  misc_feature (2)..(116): NCBI GI: 8928013 Blast Desc: C25AA_BACTJ RecName: Full=Pesticidal crystal protein cry25Aa; AltName: Full=76 kDa crystal protein; AltName: Full=Crystaline entomocidal protoxin; AltName: Full=Insecticidal
  misc_feature (1)..(118): NCBI GI: 228911584 Blast Desc: Pesticidal crystal protein cry1Bc [Bacillus thuringiensis IBL 200] gi|8927997|sp|Q9XDL1.1|CR1ID_BACTU RecName: Full=Pesticidal crystal protein cry1Id; AltName: Full=81
  misc_feature: Useful for conferring pesticidal activity to an organism
  misc_feature: Useful for controlling a pest organism
NQKLKNVVRDFIDADKAFIALIEGGLSESKAQILLLPIYAQAANVHLLLLRDAVQYKEKWGELLGAEKVGEELISPTMDYNKRLKDAIEQYTNYCVEWYNKGLDQIKQAGTSTETWLK

SEQ ID NO: 175 - DNA, 320 bp, Bacillus sp.
  misc_feature: SGI cDNA ID NO. AGRMET1G697798
  misc_feature: Encodes the peptide sequence at SEQ ID NO. 176
  misc_feature: Useful for conferring pesticidal activity to an organism
  misc_feature: Useful for controlling a pest organism
ctaagtgctttattatttggttggacacacaacagtgtcgatccaaacaatattatagcctcggataaaatcactcaaattcccgcggtgaagggagacatgttatatctagggggttccgtagtacagggtcctggatttacaggaggagatatattaaaaagaaccaatcctagcatattagggacctttgcggttacagtaaatgggtcgttatcacaaagatatcgtgtaagaattcgctatgcctctacaacagattttgaatttactggtgtttttttatcatctaataaattcacttgtgctagtacttcatc

SEQ ID NO: 176 - protein, 106 aa, Bacillus sp.
  misc_feature: SGI Peptide ID NO. AGRMET1T697798
  misc_feature (24)..(96): Pfam Id: PF03944 Pfam Desc: delta endotoxin
  misc_feature (5)..(100): NCBI GI: 8928018 Blast Desc: CR8AA_BACUK RecName: Full=Pesticidal crystal protein cry8Aa; AltName: Full=131 kDa crystal protein; AltName: Full=Crystaline entomocidal protoxin; AltName: Full=Insecticidal
  misc_feature (3)..(90): NCBI GI: 27436034 Blast Desc: AF336114_1 crystal delta-endotoxin [Bacillus thuringiensis] gi|295866|emb|CAA80235.1| crystal protein [Bacillus thuringiensis]
  misc_feature (3)..(90): NCBI GI: 188484666 Blast Desc: Cry1F [Bacillus thuringiensis]
  misc_feature (3)..(90): NCBI GI: 188484664 Blast Desc: Cry1F [Bacillus thuringiensis]
  misc_feature (3)..(90): NCBI GI: 2982744 Blast Desc: CryINA67-1 [Bacillus thuringiensis]
  misc_feature (3)..(90): NCBI GI: 8469133 Blast Desc: CR1FB_BACTM RecName: Full=Pesticidal crystal protein cry1Fb; AltName: Full=132 kDa crystal protein; AltName: Full=Crystaline entomocidal protoxin; AltName: Full=Insecticidal
  misc_feature (1)..(90): NCBI GI: 256259704 Blast Desc: insecticidal protein 3 [Bacillus thuringiensis]
  misc_feature (1)..(90): NCBI GI: 13173240 Blast Desc: insecticidal crystal protein BTRX28 [Bacillus thuringiensis serovar kunthalaRX28]
  misc_feature (1)..(90): NCBI GI: 117518746 Blast Desc: insecticidal delta endotoxin [Bacillus thuringiensis]
  misc_feature (5)..(90): NCBI GI: 62288327 Blast Desc: crystal protein Cry9Db1 [Bacillus thuringiensis]
  misc_feature: Useful for conferring pesticidal activity to an organism
  misc_feature: Useful for controlling a pest organism
LSALLFGWTHNSVDPNNIIASDKITQIPAVKGDMLYLGGSVVQGPGFTGGDILKRTNPSILGTFAVTVNGSLSQRYRVRIRYASTTDFEFTGVFLSSNKFTCASTS

SEQ ID NO: 177 - DNA, 1272 bp, Bacillus sp.
  misc_feature: SGI cDNA ID NO. AGRMET1G218291
  misc_feature: Encodes the peptide sequence at SEQ ID NO. 178
  misc_feature: Useful for conferring pesticidal activity to an organism
  misc_feature: Useful for controlling a pest organism
atgcaaaaaagaaaaaaggcaaaaaaagcaatacttgtaacaagcgtagcatttacattaggattagctgaaattggtccccttactgctttaaatacacctattattgcacatgctgatactgacactggtaataaggttatccaaatactaggagatggatctatacaattacttagcgctaagctatcccaagatgaatgggttaagaaaacactttacaaaatgggtggaacagtattagatgattgtattgggagtgcaaaccagaatggtattgcatctgttaacgactttgctagagatatgttcgtggcaagctcctctctcattccatatggaggtgtccttatctctccaatgattggcttactatggccaacggatggcaaagcaaatgcgacaaagcaattaatcgatcaaatctctaaaataatagacggtaaaattattgattacgataatgaagctcttgcaactgacttgaaaaatgcacacgatgatctaaaaaatttagaagatagcttgcaaggtacttcgcatggtggtactccaaataatgttgcccgtatgcaggaggaaccagaagatcacaatcgtgatctagcaaatcaagctaacgcatctttgcgcaaacttataaacaattgtcaaaagtcgagcttccaaaaatctgaacttcctatatacacattagctgcggctgcccatttagaacttttatcattcttggtagaaaacggagaagcatctaaatctcctaacttcaaatatgccgctaacagtatggcgggctttaaaaatgaattagcagctgctattaatgactatagggatcatatcgtagatacgtatatgcaagtcggggccgttggtaactatccaatgagcacggtacacaatccagcgttcaatgcagctcttatctatgcgaaaaatacctatgtaaagaacggagagatggtacgcaaggtggataataatttttatacaactataaccacgaatcgtgattcactagaaattaagagctcaattccaaacaaagacatagcctgtaaagtatatatcaatggggaataccgctttgctgcaaccgcatttactgatataagaggttatggaatattctctcctgacgatgtagttatggttacagcggtgattgatgggcttgaaatcactgttctagacggttacaaatttaaagatattccagaaatccctcctactatgaatggtgtggagaaagcgaagggaattttgttgtaa

SEQ ID NO: 178 - protein, 423 aa, Bacillus sp.
  misc_feature: SGI Peptide ID NO. AGRMET1T218291
  misc_feature (111)..(287): Pfam Id: PF03945 Pfam Desc: delta endotoxin, N-terminal domain
  misc_feature (111)..(285): NCBI GI: 8469155 Blast Desc: CR3BB_BACTU RecName: Full=Pesticidal crystal protein cry3Bb; AltName: Full=74 kDa crystal protein; AltName: Full=Crystaline entomocidal protoxin; AltName: Full=Insecticidal
  misc_feature (111)..(285): NCBI GI: 940200 Blast Desc: Cry3Bb2 [Bacillus thuringiensis]
  misc_feature (111)..(285): NCBI GI: 117324 Blast Desc: CR3BA_BACTO RecName: Full=Pesticidal crystal protein cry3Ba; AltName: Full=75 kDa crystal protein; AltName: Full=Crystaline entomocidal protoxin; AltName: Full=Insecticidal
  misc_feature (111)..(285): NCBI GI: 157830835 Blast Desc: CR3BA_BACTO RecName: Full=Pesticidal crystal protein cry3Ba; AltName: Full=75 kDa crystal protein; AltName: Full=Crystaline entomocidal protoxin; AltName: Full=Insecticidal
  misc_feature (111)..(285): NCBI GI: 208153 Blast Desc: crystal toxin [synthetic construct] gi|312848|emb|CAA50310.1| cryIIIA insect control protein [synthetic construct]
  misc_feature (111)..(285): NCBI GI: 471281 Blast Desc: CryIIIA insecticidal crystal protein [synthetic construct]
  misc_feature (111)..(285): NCBI GI: 45934892 Blast Desc: insecticidal crystal protein [Bacillus thuringiensis]
  misc_feature (111)..(285): NCBI GI: 142734 Blast Desc: delta-endotoxin [Bacillus thuringiensis] gi|4688623|emb|CAB41411.1| Cry3Aa protein [Bacillus thuringiensis]
  misc_feature (111)..(285): NCBI GI: 61221657 Blast Desc: CR3AA_BACTT RecName: Full=Pesticidal crystal protein cry3Aa; AltName: Full=73 kDa crystal protein; AltName: Full=Crystaline entomocidal protoxin; AltName: Full=Insecticidal
  misc_feature (111)..(285): NCBI GI: 143084 Blast Desc: insect control protein [Bacillus thuringiensis]
  misc_feature: Useful for conferring pesticidal activity to an organism
  misc_feature: Useful for controlling a pest organism
MQKRKKAKKAILVTSVAFTLGLAEIGPLTALNTPIIAHADTDTGNKVIQILGDGSIQLLSAKLSQDEWVKKTLYKMGGTVLDDCIGSANQNGIASVNDFARDMFVASSSLIPYGGVLISPMIGLLWPTDGKANATKQLIDQISKIIDGKIIDYDNEALATDLKNAHDDLKNLEDSLQGTSHGGTPNNVARMQEEPEDHNRDLANQANASLRKLINNCQKSSFQKSELPIYTLAAAAHLELLSFLVENGEASKSPNFKYAANSMAGFKNELAAAINDYRDHIVDTYMQVGAVGNYPMSTVHNPAFNAALIYAKNTYVKNGEMVRKVDNNFYTTITTNRDSLEIKSSIPNKDIACKVYINGEYRFAATAFTDIRGYGIFSPDDVVMVTAVIDGLEITVLDGYKFKDIPEIPPTMNGVEKAKGILL

SEQ ID NO: 179 - DNA, 1107 bp, Bacillus sp.
  misc_feature: SGI cDNA ID NO. AGRMET1G218530
  misc_feature: Encodes the peptide sequence at SEQ ID NO. 180
  misc_feature: Useful for conferring pesticidal activity to an organism
  misc_feature: Useful for controlling a pest organism
aaaaccgtgggagagaattctagtctcggatatgtgagaaccataaatcgaattcctattgagggtaatcaaacgctagctaaccacagaatgtcatgggttagcggttctttgcgcccagtatcggacggtccaatgggaaccaagattcctccttacatctcgtgtgcagctttaggttggacgcatatcagtgcgaatctagaaaataagatagtctcggatagaatcactcaaattccagcggtgaaggggtactggactcgaggtcctgtttcggttgtgaggggacctggttctacaggaggagatctcgttcaattaagcccttctggcgaagtatcaatcatggtaagaccatcgcgccctggtatatttaactatcgtgttcgaattcgatatgcggctgtagcgagtggaaaacttaatgtcaaaaagtacgttaatcatatacatgcatctacaacgtatgattataaacaaacgactgctggtaattttacgtattcatcgttccaatatttagaggtttacaacttcactctagcagaatctcaatttgaggtccggctcaccaatgagagtggtggtcctatctatatcgacagaatcgaatttattccgttaacgccaaaaccagaaccaaagccaatagtaccagatggtacctatcaaatcgttacggctttaaataatagtagtgttgtagacctggatcagagtccccctcctccaaattggtcttcacctcgaaatgttcaattatgggaaaatggtaacgctactaatcaaaaatggaagttcgtatatgatgaaagtaaatatgcatatcaaattataaatctagcaaatccgaaggaagtattaacctggtctttcaatgtagagagaccatccgaggtgaatgctgtaccaaaccagcaacataaccgccagtattggatacctgaacatgcaggaaatgggtatttttatttaaaaaatatggaagatacgaacggagcattagatgtaagtaatgctagtactgcaaatggaacaaagattatatacactggctttaatggtggcacgagtcaaaagttcaaactgaataggttgagttaa

SEQ ID NO: 180 - protein, 368 aa, Bacillus sp.
  misc_feature: SGI Peptide ID NO. AGRMET1T218530
  misc_feature (77)..(209): Pfam Id: PF03944 Pfam Desc: delta endotoxin
  misc_feature (254)..(333): Pfam Id: PF05588 Pfam Desc: Clostridium botulinum HA-17 protein
  misc_feature (238)..(362): Pfam Id: PF00652 Pfam Desc: Ricin-type beta-trefoil lectin domain
  misc_feature (26)..(367): NCBI GI: 228936898 Blast Desc: Cancer cell-killing Cry protein [Bacillus thuringiensis serovar andalousiensis BGSC 4AW1] gi|228822789|gb|EEM68667.1| Cancer cell-killing Cry protein BGSC
  misc_feature (23)..(364): NCBI GI: 51090228 Blast Desc: cancer cell-killing Cry protein parasporin-3 [Bacillus thuringiensis] gi|51090232|dbj|BAD35160.1| cancer cell-killing Cry protein parasporin-3 [Bacillus thuringiensis]
  misc_feature (3)..(367): NCBI GI: 51090240 Blast Desc: Cry protein [Bacillus thuringiensis]
  misc_feature (23)..(364): NCBI GI: 51090236 Blast Desc: cancer cell-killing Cry protein [Bacillus thuringiensis]
  misc_feature (204)..(368): NCBI GI: 228903967 Blast Desc: mosquitocidal toxin protein [Bacillus thuringiensis IBL 4222] gi|228855685|gb|EEN00236.1| mosquitocidal toxin protein [Bacillus thuringiensis IBL 4222]
  misc_feature (204)..(368): NCBI GI: 75761624 Blast Desc: MOSQUITOCIDAL TOXIN PROTEIN [Bacillus thuringiensis serovar israelensis ATCC 35646] gi|74490889|gb|EAO54154.1| MOSQUITOCIDAL TOXIN PROTEIN [Bacillus thuringiensis serovar ATCC
  misc_feature (204)..(368): NCBI GI: 229119395 Blast Desc: mosquitocidal toxin protein [Bacillus cereus Rock1-3] gi|228664073|gb|EEL19614.1| mosquitocidal toxin protein [Bacillus cereus Rock1-3]
  misc_feature (216)..(368): NCBI GI: 228937264 Blast Desc: bthur0009_56310 [Bacillus thuringiensis serovar andalousiensis BGSC 4AW1] gi|228822405|gb|EEM68354.1| bthur0009_56310 [Bacillus thuringiensis serovar andalousiensis
  misc_feature (196)..(364): NCBI GI: 228937264 Blast Desc: bthur0009_56310 [Bacillus thuringiensis serovar andalousiensis BGSC 4AW1] gi|228822405|gb|EEM68354.1| bthur0009_56310 [Bacillus thuringiensis serovar andalousiensis
  misc_feature (21)..(208): NCBI GI: 134274695 Blast Desc: pesticidal crystal protein cry24-like [Bacillus thuringiensis]
  misc_feature: Useful for conferring pesticidal activity to an organism
  misc_feature: Useful for controlling a pest organism
KTVGENSSLGYVRTINRIPIEGNQTLANHRMSWVSGSLRPVSDGPMGTKIPPYISCAALGWTHISANLENKIVSDRITQIPAVKGYWTRGPVSVVRGPGSTGGDLVQLSPSGEVSIMVRPSRPGIFNYRVRIRYAAVASGKLNVKKYVNHIHASTTYDYKQTTAGNFTYSSFQYLEVYNFTLAESQFEVRLTNESGGPIYIDRIEFIPLTPKPEPKPIVPDGTYQIVTALNNSSVVDLDQSPPPPNWSSPRNVQLWENGNATNQKWKFVYDESKYAYQIINLANPKEVLTWSFNVERPSEVNAVPNQQHNRQYWIPEHAGNGYFYLKNMEDTNGALDVSNASTANGTKIIYTGFNGGTSQKFKLNRLS

SEQ ID NO: 181 - DNA, 539 bp, Bacillus sp.
  misc_feature: SGI cDNA ID NO. AGRMET1G697889
  misc_feature: Encodes the peptide sequence at SEQ ID NO. 182
  misc_feature: Useful for conferring pesticidal activity to an organism
  misc_feature: Useful for controlling a pest organism
tcagatacacaagcagctcaaagaaattatggagtttcgagagttacttttagtacatcaaatgtaaataatgcgccaggatctttgacatacgatgtgccaaatgttaacaactttcaatctatagtatcagagttgccaggagaaattgagcaaagaccagacgcaaaagattttagccataggttgtcctatatatcacattttattgcacgacgaagcagtttaggggggaatattaaccttttaacgtatggttggacacataccagtatggatcgtcataatcgtcttgaaccggataaaattactcaaatagatgctgttaaaggttggggagaggggagtgtcataccaggacctactggagggaatttggtacgaatagttggaagtcatccttttccctattatattagagttcaagcaccacaaacacaaacaaattatcgtattcgtttgcgttatgcttgtttaggcgagggttggggtaaagcgtgggtatctcacagtaacgagtctcattttgttgaattccc

SEQ ID NO: 182 - protein, 179 aa, Bacillus sp.
  misc_feature: SGI Peptide ID NO. AGRMET1T697889
  misc_feature (103)..(162): Pfam Id: PF03944 Pfam Desc: delta endotoxin
  misc_feature (7)..(93): Pfam Id: PF00555 Pfam Desc: delta endotoxin
  misc_feature (5)..(158): NCBI GI: 227976384 Blast Desc: pesticidal crystal protein [Bacillus thuringiensis]
  misc_feature (10)..(162): NCBI GI: 157418804 Blast Desc: Cry toxin [Bacillus thuringiensis]
  misc_feature (6)..(162): NCBI GI: 16945772 Blast Desc: mosquitocidal toxin [Bacillus thuringiensis serovar aizawai]
  misc_feature (11)..(166): NCBI GI: 315076091 Blast Desc: insecticidal crystal protein DIG-3 [Bacillus thuringiensis]
  misc_feature (42)..(166): NCBI GI: 41688283 Blast Desc: mosquitocidal toxin [Bacillus thuringiensis serovar entomocidus]
  misc_feature (44)..(159): NCBI GI: 8469153 Blast Desc: CR1BD_BACTZ RecName: Full=Pesticidal crystal protein cry1Bd; AltName: Full=140 kDa crystal protein; AltName: Full=Crystaline entomocidal protoxin; AltName: Full=Insecticidal
  misc_feature (44)..(159): NCBI GI: 22213635 Blast Desc: CryIBII [Bacillus thuringiensis]
  misc_feature (14)..(158): NCBI GI: 83743080 Blast Desc: toxin pbt145-1 [Bacillus thuringiensis] gi|213958617|gb|ACJ54705.1| spherical crystal protein [Bacillus thuringiensis]
  misc_feature (14)..(158): NCBI GI: 48727548 Blast Desc: crystal protein [Bacillus thuringiensis]
  misc_feature (14)..(158): NCBI GI: 78191081 Blast Desc: Hbf-18-1 [Bacillus thuringiensis]
  misc_feature: Useful for conferring pesticidal activity to an organism
  misc_feature: Useful for controlling a pest organism
SDTQAAQRNYGVSRVTFSTSNVNNAPGSLTYDVPNVNNFQSIVSELPGEIEQRPDAKDFSHRLSYISHFIARRSSLGGNINLLTYGWTHTSMDRHNRLEPDKITQIDAVKGWGEGSVIPGPTGGNLVRIVGSHPFPYYIRVQAPQTQTNYRIRLRYACLGEGWGKAWVSHSNESHFVEF

SEQ ID NO: 183 - DNA, 1137 bp, Bacillus sp.
  misc_feature: SGI cDNA ID NO. AGRMET1G218952
  misc_feature: Encodes the peptide sequence at SEQ ID NO. 184
  misc_feature: Useful for conferring pesticidal activity to an organism
  misc_feature: Useful for controlling a pest organism
aaaaatccactagaacaacaaatgaaagtagatacactgcaaccaaaaatacaaggtcaatactatgatagcagcacgatgtcattaaaagatattgatctttgggtacaggatctttcgaaacaatcagggtcaggggattggaagaacacacttactgtagtggaaaaatcattaccaacaatttataaagatttaaatagcgggaattttaataatacttttagaaccttgtcaacagtaagtacatcgatgattccgtatgcaggagcatttatttctcccttacttagtgtactttggccagagaatggtcaaaatataaagcaaatgatacaggaaatggaagaaaaacttggtaatttaatggatgaaaaaattcaagataaagatttagctgatattcaatcagaaataacggggatgatgaaaaatttacaagaatttgaaaactcattaaacgggaacataactcaatattatggtcagggtgatgtagattctcttaaccaagatcgtatagtaagcattcaaaatcacttcaacactcttattgaacttgctcgaaaagtgcatccagaggatacaagtaaaaatttcaaaatagcagaactacccttatttacagttattgcaactgctcacttaaatttcctacacgttgttgagaaaaacggaacttcacctaaaatcaactttacacaagcagctttaaaagattttctacaaagtatgattaaaaatcaagaggattataaaaattacatagcaaacacgtataacgacgcagaagctaaaataaatcaaaaaataaaaaatgaaggagataaggctaatgctgctcgcgaaagtattttcaactcaacttatggtacaaattttgatgaatcagcagtaacaaaagacattgcggaagtacaaaacaagataacctacatgatagcacataggcctagtggacacataacatcagaacagaataaatataatgctgaattaaaaaaatatacaaatgcgcgggacgatttaaaaaatagtctggcacaatataaactattattggcacaaaagaatgactattatgaaaagacaaaggggaacgaaggattcaagacagcgcttaatgggaaagtataa

SEQ ID NO: 184 - protein, 378 aa, Bacillus sp.
  misc_feature: SGI Peptide ID NO. AGRMET1T218952
  misc_feature (78)..(270): Pfam Id: PF03945 Pfam Desc: delta endotoxin, N-terminal domain
  misc_feature (78)..(271): NCBI GI: 220683827 Blast Desc: Cry2Ah2 [Bacillus thuringiensis]
  misc_feature (78)..(271): NCBI GI: 302634222 Blast Desc: insecticidal crystal protein [Bacillus thuringiensis]
  misc_feature (78)..(271): NCBI GI: 196212999 Blast Desc: pesticidal crystal protein [Bacillus thuringiensis]
  misc_feature (78)..(271): NCBI GI: 31872007 Blast Desc: crystal delta-endotoxin Cry2ab-HB [Bacillus thuringiensis]
  misc_feature (78)..(271): NCBI GI: 186694308 Blast Desc: Cry2Ab [Bacillus thuringiensis]
  misc_feature (78)..(271): NCBI GI: 118566336 Blast Desc: crystal protein [Bacillus thuringiensis]
  misc_feature (78)..(271): NCBI GI: 117328 Blast Desc: CR2AB_BACTK RecName: Full=Pesticidal crystal protein cry2Ab; AltName: Full=71 kDa crystal protein; AltName: Full=Crystaline entomocidal protoxin; AltName: Full=Insecticidal
  misc_feature (78)..(271): NCBI GI: 86440155 Blast Desc: Cry2Ab [Bacillus thuringiensis]
  misc_feature (78)..(271): NCBI GI: 120431602 Blast Desc: cry2A-type insecticidal crystal protein [Bacillus thuringiensis]
  misc_feature (93)..(271): NCBI GI: 270209765 Blast Desc: delta endotoxin [Bacillus thuringiensis]
  misc_feature: Useful for conferring pesticidal activity to an organism
  misc_feature: Useful for controlling a pest organism
KNPLEQQMKVDTLQPKIQGQYYDSSTMSLKDIDLWVQDLSKQSGSGDWKNTLTVVEKSLPTIYKDLNSGNFNNTFRTLSTVSTSMIPYAGAFISPLLSVLWPENGQNIKQMIQEMEEKLGNLMDEKIQDKDLADIQSEITGMMKNLQEFENSLNGNITQYYGQGDVDSLNQDRIVSIQNHFNTLIELARKVHPEDTSKNFKIAELPLFTVIATAHLNFLHVVEKNGTSPKINFTQAALKDFLQSMIKNQEDYKNYIANTYNDAEAKINQKIKNEGDKANAARESIFNSTYGTNFDESAVTKDIAEVQNKITYMIAHRPSGHITSEQNKYNAELKKYTNARDDLKNSLAQYKLLLAQKNDYYEKTKGNEGFKTALNGKV

SEQ ID NO: 185 - DNA, 1159 bp, Bacillus sp.
  misc_feature: SGI cDNA ID NO. AGRMET1G218383
  misc_feature: Encodes the peptide sequence at SEQ ID NO. 186
  misc_feature: Useful for conferring pesticidal activity to an organism
  misc_feature: Useful for controlling a pest organism
atgggaacgggggattttatgacaaagaaacaaaagaaaatattatctatcgcattagctacgggtgtatttgctggaacctacattccaactgcttatacggcatttgcagaaaatgaacaaaaagaagatttacaagaaaatcaaacaaaaaatattaatcaaaatagccttccgatagattcatatggttggtttgagaacccttataagggagtaactttttcacaatttatagatgcatttaataacaatcagtggcaacctttattagtcaatattaagaacaaaggggatgctggttcgggtactatttcttttctaaaaggcatgatgacaacaggattatcattattaccaccaccagctagtcttttagcaagtatttggagtgtgtttattcctactaatgatgctaacggaacggatatgtggaggcaattagaaacatacatcgatgaaaaaatagatagtaaaataaatgattatcataaatatcttatgggtgctgaatttaatggggctatgtcagcgataaaagagtatcaacgggttctccaaatatataatgacagtgaaaatagcttaaaaagagtagaagagcctggcacaccagtgattgaagctgtccgagcagcagataggaagttgaaagagtttattgctgttattcaaacgcctgaaaaatcaaatgattctgtatatcaacaaataacagctccaatctttgtgcaagctgcaaatgctcatctcttattacagagagatatgattttatatggtgaagaatggggaatggataaagatcaatggcaaggatataaggataatcagaaaaaacttattcaagaatatacgaattatgctatgaaagtatataatgatggattggaaaaaaggaaaaaagaagctgaagagattaatacgcaacaaccaaatagaaatactgacagatggaatcatattaatgattatgtaagggaatatacattaagcgttttagattttgtagacttgtttccagcaacaaatcctgaaacatattctaaaggcgtaatgcaagaaaattctaggcaaatttattcttctattaaaggcgcagtcataccacaaggaggaacaggggaaggaacaacaggacgtcctaaaggggttatga

SEQ ID NO: 186 - protein, 386 aa, Bacillus sp.
  misc_feature: SGI Peptide ID NO. AGRMET1T218383
  misc_feature (121)..(346): Pfam Id: PF03945 Pfam Desc: delta endotoxin, N-terminal domain
  misc_feature (1)..(379): NCBI GI: 229065811 Blast Desc: 83-kDa crystal protein [Bacillus cereus AH603] gi|228715456|gb|EEL67276.1| 83-kDa crystal protein [Bacillus cereus AH603]
  misc_feature (7)..(379): NCBI GI: 308756031 Blast Desc: cry protein [Bacillus thuringiensis]
  misc_feature (117)..(380): NCBI GI: 260268368 Blast Desc: M019CP78B [Bacillus thuringiensis]
  misc_feature (117)..(380): NCBI GI: 75812160 Blast Desc: [Bacillus thuringiensis]
  misc_feature (117)..(380): NCBI GI: 75812162 Blast Desc: [Bacillus thuringiensis]
  misc_feature (117)..(376): NCBI GI: 260268372 Blast Desc: M019CP78A [Bacillus thuringiensis]
  misc_feature (117)..(380): NCBI GI: 88687362 Blast Desc: Cry31-like 82-kDa protein [Bacillus thuringiensis]
  misc_feature (117)..(380): NCBI GI: 75812164 Blast Desc: [Bacillus thuringiensis]
  misc_feature (117)..(380): NCBI GI: 114842165 Blast Desc: [Bacillus thuringiensis]
  misc_feature (117)..(380): NCBI GI: 114842169 Blast Desc: [Bacillus thuringiensis]
  misc_feature: Useful for conferring pesticidal activity to an organism
  misc_feature: Useful for controlling a pest organism
MGTGDFMTKKQKKILSIALATGVFAGTYIPTAYTAFAENEQKEDLQENQTKNINQNSLPIDSYGWFENPYKGVTFSQFIDAFNNNQWQPLLVNIKNKGDAGSGTISFLKGMMTTGLSLLPPPASLLASIWSVFIPTNDANGTDMWRQLETYIDEKIDSKINDYHKYLMGAEFNGAMSAIKEYQRVLQIYNDSENSLKRVEEPGTPVIEAVRAADRKLKEFIAVIQTPEKSNDSVYQQITAPIFVQAANAHLLLQRDMILYGEEWGMDKDQWQGYKDNQKKLIQEYTNYAMKVYNDGLEKRKKEAEEINTQQPNRNTDRWNHINDYVREYTLSVLDFVDLFPATNPETYSKGVMQENSRQIYSSIKGAVIPQGGTGEGTTGRPKGVM

SEQ ID NO: 187 - DNA, 1029 bp, Bacillus sp.
  misc_feature: SGI cDNA ID NO. AGRMET1G218678
  misc_feature: Encodes the peptide sequence at SEQ ID NO. 188
  misc_feature: Useful for conferring pesticidal activity to an organism
  misc_feature: Useful for controlling a pest organism
atgtgcagtcatccaaggtatccgcttgcgcaggcacccgagttagtattacaaaacatgttaaattatacgagagaacagaaggctgtaggtgaagctgtagggacatcctcagaaattacatcacaacttctaagtttaagtcgttcagcattatctgtggctggaggaatcatcaaagtgatatttaaatttctttggccatcagaaacaaatagggaagaagtttggaacacctttatggacgcggaagagagtctcataaatgaaaaaattgaaaactatgcacgaaagagagcaaatgcagaattaaacagcttatacaataccttgagagaatataatgataagcttgagatttttagccaagatccaaccgaaaatcacgcagcacacttacgaatgcaagttattgtcacagaaaatctatttgagtatactatgctcttttttgcggtagaggactatgaaatacaattattaactgtgtatgcacaagctgccaatctccatttagcctttctacgagacgctgtcaagtttggaggggaatggggattttcagaacttgaaataaaagattttaatagaagcatggaagaacgtacgaaagaaaatacaaattattatatcaatatatatagtcaaggtctagaaaaggctaaaacattagcagccaatctctatgatcacaatacctatccatggacccgctataaccagggggttagagaagaagaaaaacccaattgtagattaaaattcgatagttctgatccgctgaatgaatttcataagcaagaatctccacatatgggacctgttcgttggtcgataagcgaataccagaaattagagaattggaatttatatcatgcgtaccgaagagatatgacaattatggtcttagatgttgtttcattatggccaacatatgatccaggattgtatcccacttcaaacggagtgaaagcagaactaacaagagaactatatacagatatacggggggacaacttatcgaagtga

SEQ ID NO: 188 - protein, 342 aa, Bacillus sp.
  misc_feature: SGI Peptide ID NO. AGRMET1T218678
  misc_feature (36)..(244): Pfam Id: PF03945 Pfam Desc: delta endotoxin, N-terminal domain
  misc_feature (284)..(315): Pfam Id: PF03945 Pfam Desc: delta endotoxin, N-terminal domain
  misc_feature (1)..(337): NCBI GI: 228936898 Blast Desc: Cancer cell-killing Cry protein [Bacillus thuringiensis serovar andalousiensis BGSC 4AW1] gi|228822789|gb|EEM68667.1| Cancer cell-killing Cry protein BGSC
  misc_feature (3)..(337): NCBI GI: 51090228 Blast Desc: cancer cell-killing Cry protein parasporin-3 [Bacillus thuringiensis] gi|51090232|dbj|BAD35160.1| cancer cell-killing Cry protein parasporin-3 [Bacillus thuringiensis]
  misc_feature (3)..(337): NCBI GI: 51090236 Blast Desc: cancer cell-killing Cry protein [Bacillus thuringiensis]
  misc_feature (1)..(338): NCBI GI: 51090240 Blast Desc: Cry protein [Bacillus thuringiensis]
  misc_feature (6)..(337): NCBI GI: 17385650 Blast Desc: crystal protein CryE6S [Bacillus thuringiensis]
  misc_feature (8)..(337): NCBI GI: 228937265 Blast Desc: bthur0009_56320 [Bacillus thuringiensis serovar andalousiensis BGSC 4AW1] gi|228822406|gb|EEM68355.1| bthur0009_56320 [Bacillus thuringiensis serovar andalousiensis
  misc_feature (1)..(337): NCBI GI: 15721993 Blast Desc: crystal protein [Bacillus thuringiensis serovar yunnanensis]
  misc_feature (6)..(338): NCBI GI: 17385648 Blast Desc: crystal protein CryE6Q [Bacillus thuringiensis]
  misc_feature (6)..(337): NCBI GI: 315936309 Blast Desc: Cry8 [Bacillus thuringiensis]
  misc_feature (6)..(337): NCBI GI: 78191081 Blast Desc: Hbf-18-1 [Bacillus thuringiensis]
  misc_feature: Useful for conferring pesticidal activity to an organism
  misc_feature: Useful for controlling a pest organism
MCSHPRYPLAQAPELVLQNMLNYTREQKAVGEAVGTSSEITSQLLSLSRSALSVAGGIIKVIFKFLWPSETNREEVWNTFMDAEESLINEKIENYARKRANAELNSLYNTLREYNDKLEIFSQDPTENHAAHLRMQVIVTENLFEYTMLFFAVEDYEIQLLTVYAQAANLHLAFLRDAVKFGGEWGFSELEIKDFNRSMEERTKENTNYYINIYSQGLEKAKTLAANLYDHNTYPWTRYNQGVREEEKPNCRLKFDSSDPLNEFHKQESPHMGPVRWSISEYQKLENWNLYHAYRRDMTIMVLDVVSLWPTYDPGLYPTSNGVKAELTRELYTDIRGDNLSK

SEQ ID NO: 189 - DNA, 1316 bp, Bacillus sp.
  misc_feature: SGI cDNA ID NO. AGRMET1G218616
  misc_feature: Encodes the peptide sequence at SEQ ID NO. 190
  misc_feature: Useful for conferring pesticidal activity to an organism
  misc_feature: Useful for controlling a pest organism
ttgttgatgaatcaaaattacaaaaacaatgcgtatgaaattttagataatgataatacggtctatcaaccaaggtatccgcttgcgcaggcaccggattctgaattgcgaaatatgaattacaaagattggttagctaagtttccagatagagcccctgtcattcctgcggaaagttacaatgcagatttaagagatgcaatcattacaagtatcaacatcctcacctcccttctttcacttacaatcccagtagcgggagtagcgggagggatcatcagtgcaatttttggttggctttggcctattaatacagaagaagtatggcaggcttttatgtcagcagtcgaagatctcgtggaccaaaagattgacgattttgcacgagcgcaagctattgcccggttacgtggtatgcatgatgtcctagagttatatgaaactgcagtaagtgaattgcaaaaggatcctcaaaatgaaagactaaaagaaaatgtccgagttcaatttgtagccactaatacatttgttgttggttcgctgcccctgtttcgtgtccatggatatgaagtacctatgttagtggcttatgcggaagcagctaatctccatcttcttctcctacgcgatgcggtaaagtttggaacaagttgggggatggatgcagccactgtaaatggctatcaaagcaaccttgagactgggataacggtttacacagatggttgtgtggagacatacaacaaaggtatagaaaaaactaagacattaaaagcaaatgtaaaggattataatagatatccatgggcacaatatcatgatttactcccatctttaggtggtagtcctgagaaggattttcaaaatatggaaaattggaatttattgaatagtttccgaagagacatgacccttatggcattagatcttgtctccgtatggccaacatataattcaaaagaatatccattgccagtaaaagcacagctcacacgagagatatataccgatttacgtggatgttatgcgggggacataaacagtacggaagctcaaatagtaagaccaccacatctgtttacattctttcaatcagctaccctatatacaggaaatactccctttactccgtatgttggtattcaacagagtggacattacactttaggaccaagtttcacaaccttggtcaatggaatctctgaaggcgctccaaataccgttactgctaccccgtcagatgcgattatcaataaagttgatatcgataccgggaatgaactatatcgatttatgttttaccaagaaaattacac

SEQ ID NO: 190 - protein, 438 aa, Bacillus sp.
  misc_feature: SGI Peptide ID NO. AGRMET1T218616
  misc_feature (70)..(267): Pfam Id: PF03945 Pfam Desc: delta endotoxin, N-terminal domain
  misc_feature (288)..(320): Pfam Id: PF03945 Pfam Desc: delta endotoxin, N-terminal domain
  misc_feature (326)..(430): Pfam Id: PF00555 Pfam Desc: delta endotoxin
  misc_feature (1)..(438): NCBI GI: 228936898 Blast Desc: Cancer cell-killing Cry protein [Bacillus thuringiensis serovar andalousiensis BGSC 4AW1] gi|228822789|gb|EEM68667.1| Cancer cell-killing Cry protein BGSC
  misc_feature (3)..(435): NCBI GI: 51090240 Blast Desc: Cry protein [Bacillus thuringiensis]
  misc_feature (3)..(373): NCBI GI: 51090228 Blast Desc: cancer cell-killing Cry protein parasporin-3 [Bacillus thuringiensis] gi|51090232|dbj|BAD35160.1| cancer cell-killing Cry protein parasporin-3 [Bacillus thuringiensis]
  misc_feature (3)..(373): NCBI GI: 51090236 Blast Desc: cancer cell-killing Cry protein [Bacillus thuringiensis]
  misc_feature (3)..(422): NCBI GI: 17385650 Blast Desc: crystal protein CryE6S [Bacillus thuringiensis]
  misc_feature (9)..(403): NCBI GI: 15721993 Blast Desc: crystal protein [Bacillus thuringiensis serovar yunnanensis]
  misc_feature (3)..(364): NCBI GI: 17385648 Blast Desc: crystal protein CryE6Q [Bacillus thuringiensis]
  misc_feature (10)..(411): NCBI GI: 67973231 Blast Desc: Cry8 [Bacillus thuringiensis]
  misc_feature (10)..(411): NCBI GI: 78191077 Blast Desc: Snun8-1 [Bacillus thuringiensis]
  misc_feature (10)..(411): NCBI GI: 194272337 Blast Desc: delta-endotoxin [Bacillus thuringiensis]
  misc_feature: Useful for conferring pesticidal activity to an organism
  misc_feature: Useful for controlling a pest organism
MLMNQNYKNNAYEILDNDNTVYQPRYPLAQAPDSELRNMNYKDWLAKFPDRAPVIPAESYNADLRDAIITSINILTSLLSLTIPVAGVAGGIISAIFGWLWPINTEEVWQAFMSAVEDLVDQKIDDFARAQAIARLRGMHDVLELYETAVSELQKDPQNERLKENVRVQFVATNTFVVGSLPLFRVHGYEVPMLVAYAEAANLHLLLLRDAVKFGTSWGMDAATVNGYQSNLETGITVYTDGCVETYNKGIEKTKTLKANVKDYNRYPWAQYHDLLPSLGGSPEKDFQNMENWNLLNSFRRDMTLMALDLVSVWPTYNSKEYPLPVKAQLTREIYTDLRGCYAGDINSTEAQIVRPPHLFTFFQSATLYTGNTPFTPYVGIQQSGHYTLGPSFTTLVNGISEGAPNTVTATPSDAIINKVDIDTGNELYRFMFYQENY

SEQ ID NO: 191 - DNA, 2196 bp, Bacillus sp.
  misc_feature: SGI cDNA ID NO. AGRMET1G218876
  misc_feature: Encodes the peptide sequence at SEQ ID NO. 192
  misc_feature: Useful for conferring pesticidal activity to an organism
  misc_feature: Useful for controlling a pest organism
atgccgacaaaaaaagctttacttataacaagcacagcattaacgctatccttgacaggaataggccctattaatttgatccaaaaacccattactgcacaagccgcgggcacttcaaatggcgctctagaatccgcattaagtagttttactaaaagcttcgaaaagaatacaaaaacgggtatgattgtaaatgcgttaattaaagatgatataaaccccttgattacatcagcttataaagatcaggttagctataataacattgccaaaaatttatttacaaccagtgcaagtatgattccttatgggggaccaatattaagcaccgtattaagtttaatttggccaggagatttaaaccctaatcaaaacccgtttgaattaattaaacctcaaatcgaaaacttaatagatgaaaaaattagtgactacaatcaagaaacattaaaaaccaatttcaacgccattaaacaaaacatgaaatatttagaacaagtactcaataaagataccaggtcagaagattcttcagcagcagaagctcgtgacagaatgagatacattgatcaagattttgtaagaatattagagctatgtaaggttaaaaatttggaagtatcatcattacctttatatgctcaggttgcgcaagcccatttaatgtttacaaagtatgtattgtcgcataaaaatcaatttggtttagctccagagaacgttactacgtataaaaattttttacatcaacgtattaatgaatacacaaattatgtagaaaaaacgtatcaagacggtttaacaaaggtaacagaaaaggcagaaaaaatgagtgacaatgaaatatatggaccattctcagcaggtaaaggtcctgattattataaatatcgagctacacaaaaatggaacaaaatcaatgaatacaaacgtgcaatgactttaagcgcattagacttcgtagctctttatccactagctgatattgatatctatcccggagagatagatacaagccaagcatatacaagagaaattcactctgatattgtcggacaagtagcaagtaatagaggaaatgatgaaaaccaagttactacattggatgaaatcaaccaaaaaatgaaaaatcgtgaatatccagggacattaaatagtgttcgactttggacaggagatcgggtagaagctctatctgaatctttcacaagaccaggcggtcaacaatactcctcatctattgttggaaatacaagttctacggcaccaatccgatacttaaatattcattctgacgaccctataacaaagatgactgcaagaggacaaatagctctacaacgtattggattcggagatgagaacgcccattcagagaattcatttggtgtaaatttagagcgtggaaaaaattactcttttgattatgaaggacaacaattatcagatgtaaaagcatttggcatgtacaaatggccaggttttaattctgttgacgccattgtttcttcctttattccaatcgatgtttcagctaataacccattgaattcaacggcaattacacagatttcttcacaaaagtttacagaaaaaacaggaaatatatgttctgttgatgaacccttaaatggttcgaatgcattagaatttaacagtaaaggttcttctttaaaatataaaattactgctgctgatgctggaacatataaagttaggtatcgtgcaagaattaacgccgatgtagatttacaattaaacgatcaaacagctacgcacatttcaaaaaaaccagaaacttatggagtttatgatggccctacaattcatttacaaaaaggacaaaatgatattacactaacagatgtaaacggcggcaatgttggtcttgacaaaattgagtttgttcctgtagatgtgaaagttggacaaaatgagcaatctgatgtttatgatgccacagacgttaaagtaacgtataaagatggggtctataaggtggactttccaaaaggtgatttcgaagatggaaggtgggccataatatatataaataatcaacgctctaactccgctattaggcatcttgaaactagtggttatgatggtaatgatagaattagagtaactattgaaaaaaatggacaggagacaactgtggttgatcgcctaatgaaagatttacctgccaattaa

SEQ ID NO: 192 - protein, 731 aa, Bacillus sp.
  misc_feature: SGI Peptide ID NO. AGRMET1T218876
  misc_feature (98)..(329): Pfam Id: PF03945 Pfam Desc: delta endotoxin, N-terminal domain
  misc_feature (521)..(639): Pfam Id: PF03944 Pfam Desc: delta endotoxin
  misc_feature (47)..(639): NCBI GI: 229065811 Blast Desc: 83-kDa crystal protein [Bacillus cereus AH603] gi|228715456|gb|EEL67276.1| 83-kDa crystal protein [Bacillus cereus AH603]
  misc_feature (91)..(639): NCBI GI: 308756031 Blast Desc: cry protein [Bacillus thuringiensis]
  misc_feature (71)..(638): NCBI GI: 114842169 Blast Desc: [Bacillus thuringiensis]
  misc_feature (71)..(638): NCBI GI: 88687362 Blast Desc: Cry31-like 82-kDa protein [Bacillus thuringiensis]
  misc_feature (71)..(638): NCBI GI: 114842165 Blast Desc: [Bacillus thuringiensis]
  misc_feature (71)..(638): NCBI GI: 260268372 Blast Desc: M019CP78A [Bacillus thuringiensis]
  misc_feature (71)..(638): NCBI GI: 9798640 Blast Desc: 81-kDa leukemia toxin [Bacillus thuringiensis] gi|88687360|dbj|BAE79808.1| Cry31-like 81-kDa protein [Bacillus thuringiensis]
  misc_feature (71)..(638): NCBI GI: 114842167 Blast Desc: [Bacillus thuringiensis]
  misc_feature (55)..(604): NCBI GI: 281210769 Blast Desc: PPL_01928 [Polysphondylium pallidum PN500]
  misc_feature (71)..(638): NCBI GI: 37543234 Blast Desc: 83-KDa crystal protein [Bacillus thuringiensis]
  misc_feature: Useful for conferring pesticidal activity to an organism
  misc_feature: Useful for controlling a pest organism
MPTKKALLITSTALTLSLTGIGPINLIQKPITAQAAGTSNGALESALSSFTKSFEKNTKTGMIVNALIKDDINPLITSAYKDQVSYNNIAKNLFTTSASMIPYGGPILSTVLSLIWPGDLNPNQNPFELIKPQIENLIDEKISDYNQETLKTNFNAIKQNMKYLEQVLNKDTRSEDSSAAEARDRMRYIDQDFVRILELCKVKNLEVSSLPLYAQVAQAHLMFTKYVLSHKNQFGLAPENVTTYKNFLHQRINEYTNYVEKTYQDGLTKVTEKAEKMSDNEIYGPFSAGKGPDYYKYRATQKWNKINEYKRAMTLSALDFVALYPLADIDIYPGEIDTSQAYTREIHSDIVGQVASNRGNDENQVTTLDEINQKMKNREYPGTLNSVRLWTGDRVEALSESFTRPGGQQYSSSIVGNTSSTAPIRYLNIHSDDPITKMTARGQIALQRIGFGDENAHSENSFGVNLERGKNYSFDYEGQQLSDVKAFGMYKWPGFNSVDAIVSSFIPIDVSANNPLNSTAITQISSQKFTEKTGNICSVDEPLNGSNALEFNSKGSSLKYKITAADAGTYKVRYRARINADVDLQLNDQTATHISKKPETYGVYDGPTIHLQKGQNDITLTDVNGGNVGLDKIEFVPVDVKVGQNEQSDVYDATDVKVTYKDGVYKVDFPKGDFEDGRWAIIYINNQRSNSAIRHLETSGYDGNDRIRVTIEKNGQETTVVDRLMKDLPAN

SEQ ID NO: 193 - DNA, 1577 bp, Bacillus sp.
  misc_feature: SGI cDNA ID NO. AGRMET1G218404
  misc_feature: Encodes the peptide sequence at SEQ ID NO. 194
  misc_feature: Useful for conferring pesticidal activity to an organism
  misc_feature: Useful for controlling a pest organism
gtgaagaatatgagtaataccttagtaccttataacgttttgagaagtatagatatgccgaacatatcaggaaccaagtgggataaaggaatgtttatcaatgcccttgataatacttcttttcttttagagcttatagaaaaaggaattaatgatggtgatgatgtgttaggtctgttaagttttattggattaacggccttagaagcaattccaattgtgggtggagttatgtccaaacttgtttctatgttatttttccctacaaaatcaagcattaatttccagaagatatgggagcaattagaaaaagctattgagcaattagttgacaaaaagataacagaagctatgatgtctcagctaatgcaagaaatagccggtttagccaatgtgttagaagaatataggaatgcttatgatttatataatggtaaaaaattatttaatataccagataagatgacacctggggaatatctgaaaaatgtatttactactgcaaatttgcaattcattcagagaataccgacatttcagaaccctaaatatgatgtagcatttcttccattctttgttcacgctgctgaaatgcatattcttctcgttagggatgcagcaatacatggtcgagaatgggggatggatgaaactgtacaccaaaaattcaaaaaggatttaaaaaatttaattaataaatattctagttatttattagctacatataaaaaaggcctaaaagaagcatccgaaaaaaaacttgaaaataatgattttccaacaactaataaccaacatcattatattaatacagtcagatggaatgtgatcaatcaatataaaagagggatgactttaactgtctttgattttgcttacaaatggaagtattaccaagaagtttatcaaaacaatataacgttaaatccagttcgaacaatttattcagatattgcaggttcagtatatccttatgaaaaaactacacatgaaattgataatattatcaagaatcagaaccttaaatatcgtggaatcttaaaagaaatgctaatttatcatgcacatagaatcgatagtgttcaaagtaagtatataaggaacaatgaaataattgataataaaaaaactgggggggctggtggaagggcaaccttttacgattttaaatatccaataaataaccctttaatacaagtagatatgaggtatgaattagtaccattttctttaggattcaaattatataatggagaaaagctaaaatctatatcgggtgctggactccctggaaaacataaggctggcgtttatcattatgtaggaaataaagtgtcttctattataggatttggtaaaaatgaaaccggtggattcaactcactagatgcaatggtagttggttttaaacgagacgattatatacctgaaaatagttttgttggtataaacaaaaatggtaaacctgtaactaaagtagtagatgcagtgaatttctacaaagagaagtttcaatccaatataataatgattgatgaacctatgtttggagatggggttttacaattcgaaaatta

SEQ ID NO: 194 - protein, 525 aa, Bacillus sp.
  misc_feature: SGI Peptide ID NO. AGRMET1T218404
  misc_feature (71)..(299): Pfam Id: PF03945 Pfam Desc: delta endotoxin, N-terminal domain
  misc_feature (31)..(469): NCBI GI: 229065811 Blast Desc: 83-kDa crystal protein [Bacillus cereus AH603] gi|228715456|gb|EEL67276.1| 83-kDa crystal protein [Bacillus cereus AH603]
  misc_feature (31)..(469): NCBI GI: 308756031 Blast Desc: cry protein [Bacillus thuringiensis]
  misc_feature (44)..(495): NCBI GI: 328871310 Blast Desc: DFA_00259 [Dictyostelium fasciculatum]
  misc_feature (63)..(322): NCBI GI: 51090240 Blast Desc: Cry protein [Bacillus thuringiensis]
  misc_feature (44)..(460): NCBI GI: 328869331 Blast Desc: DFA_08705 [Dictyostelium fasciculatum]
  misc_feature (20)..(326): NCBI GI: 163943265 Blast Desc: Delta endotoxin central region subgroup 1 [Bacillus weihenstephanensis KBAB4] gi|163865462|gb|ABY46520.1| Delta endotoxin central region subgroup 1 [Bacillus weihenstephanensis
  misc_feature (57)..(318): NCBI GI: 41688283 Blast Desc: mosquitocidal toxin [Bacillus thuringiensis serovar entomocidus]
  misc_feature (94)..(353): NCBI GI: 51090236 Blast Desc: cancer cell-killing Cry protein [Bacillus thuringiensis]
  misc_feature (94)..(353): NCBI GI: 51090228 Blast Desc: cancer cell-killing Cry protein parasporin-3 [Bacillus thuringiensis] gi|51090232|dbj|BAD35160.1| cancer cell-killing Cry protein parasporin-3 [Bacillus thuringiensis]
  misc_feature (44)..(411): NCBI GI: 328869348 Blast Desc: DFA_08724 [Dictyostelium fasciculatum]
  misc_feature: Useful for conferring pesticidal activity to an organism
  misc_feature: Useful for controlling a pest organism
MKNMSNTLVPYNVLRSIDMPNISGTKWDKGMFINALDNTSFLLELIEKGINDGDDVLGLLSFIGLTALEAIPIVGGVMSKLVSMLFFPTKSSINFQKIWEQLEKAIEQLVDKKITEAMMSQLMQEIAGLANVLEEYRNAYDLYNGKKLFNIPDKMTPGEYLKNVFTTANLQFIQRIPTFQNPKYDVAFLPFFVHAAEMHILLVRDAAIHGREWGMDETVHQKFKKDLKNLINKYSSYLLATYKKGLKEASEKKLENNDFPTTNNQHHYINTVRWNVINQYKRGMTLTVFDFAYKWKYYQEVYQNNITLNPVRTIYSDIAGSVYPYEKTTHEIDNIIKNQNLKYRGILKEMLIYHAHRIDSVQSKYIRNNEIIDNKKTGGAGGRATFYDFKYPINNPLIQVDMRYELVPFSLGFKLYNGEKLKSISGAGLPGKHKAGVYHYVGNKVSSIIGFGKNETGGFNSLDAMVVGFKRDDYIPENSFVGINKNGKPVTKVVDAVNFYKEKFQSNIIMIDEPMFGDGVLQFEN

SEQ ID NO: 195 - DNA, 2148 bp, Bacillus sp.
  misc_feature: SGI cDNA ID NO. AGRMET1G218319
  misc_feature: Encodes the peptide sequence at SEQ ID NO. 196
  misc_feature: Useful for conferring pesticidal activity to an organism
  misc_feature: Useful for controlling a pest organism
atggtaaataatacgaatgatgatcttgaggtaagcgatacaacaagtattacgaatgataatcttgaggtaaacgatgcaacaagtattacgaatgataatcttaattcaagtgtaatttcaccatatgatgagcttccctataatgtattaacagaaccactttacacaaaatcgctagaagaaatcaaagaatactggggaaattggggagaaacagatccttcgatttttatacctccagttgttggttcaattggttccatgttggcgaagaaaatagcaggattgcttgcagaccgagcgttaaaaaaactattcgaatggctatttcctcaggacaaacctcttacaatggaagagattttacgagcaacagaagaattagtgaatcgaaaaatcacggaattagtcaggcaacaagttaatgcagaattaataggtttcattaatgctataaaagcatttgaagaagatatcaattcttttggagtatatgattcggaagattccggagtattagaatcgacatttaaatataacagaacaggaatatactcaccaccagaaccaaaagccgctatcgattcgattaatacattaaatctaatttttacgcaaaggatgcctcaattccaattatcagattggaaagttgaattgttacctttatttgcacaggcagccaacctgcatttattttttatcagagatgtaatcgataacgccgaaaaatggaatttaagtgctgctgacgttacacgctataaaaacagattaaaagattatacaaaaacatattctaattacgctatatccacatacaaaagtgcatttcaaagtaagtttcctggaagactctttaatatattacaattccgtacatttatgactctcggtgtattagattatgtttcaatttggtctatgctgagatttgataaagtaagtattaattccagctctaatttatactctgttggtgattacagtgcatcacaaggagaaataccaacttacacgcttgccaattggggctatttgcatcgtttattccaaggaagaccaaataaagtattaaatgctttatctggtcaatatctttcattctatcaacaaggtaagataataaatcaccagctttatcttccaacaacggatatcgatactctatttaaagttactactagttacatgaattcaacacctatatctataggaggaactgcgccatcacaaccgggtccattaccatcaccaggagattattatagaataggaaatccttctatttctttgaatacactggcttaccctttgacacatagttttttaggttatcgccatataaaacagctcggctatccaggctttccaggtcttttcgtttctaaatcttcttttggatttcgaaataccgcggctacacattggatgacacctaccagtagtggtagtattacgtataattatccagattattatgttcgtaactttactggtgtattacgttcgactcaaatttcatcggaagctataaatctgataaatggcccaagtagtgtgaatttaggttacaatgaatccttatggggagccgtttcaacacatactcgaggaggctttatgtctcatacaaataatggatcgtttaaacatgatatcccatatggatccacaggtgcaaatccaataggtcttactatttcagcactacaatttgatcaagtacgtaataatgacggtaagaataatcaaattgttattcacgaacgattcggaaatttaggcgacgcagtaaatttaccagcaaacagttctggcaaaagtaattacattcagtatacgattagaaatcgtggtcatattactaaaacatataaattatatgttaaattatctactatgggggaaactacaattaacttctggttcaatggcggtttgtatagtaccaaaaccattaatacgcgcactactaatgaaggtattgatgacaatggtcaatattctcagtatgtaaactttggtaattgtaccttgtcacgtgagacagataatacgataggactgggcatttatggagctcaaacatttataggacagattatattggtaccattagatgtaacgccaatttatgaatga

SEQ ID NO: 196 - protein, 715 aa, Bacillus sp.
  misc_feature: SGI Peptide ID NO. AGRMET1T218319
  misc_feature (83)..(311): Pfam Id: PF03945 Pfam Desc: delta endotoxin, N-terminal domain
  misc_feature (579)..(709): Pfam Id: PF03944 Pfam Desc: delta endotoxin
  misc_feature (32)..(714): NCBI GI: 237506879 Blast Desc: spherical crystal protein [Bacillus thuringiensis]
  misc_feature (32)..(715): NCBI GI: 150261176 Blast Desc: Cry2Aa [synthetic construct]
  misc_feature (32)..(714): NCBI GI: 61221653 Blast Desc: CR2AA_BACTK RecName: Full=Pesticidal crystal protein cry2Aa; AltName: Full=71 kDa crystal protein; AltName: Full=Crystaline entomocidal protoxin; AltName: Full=Insecticidal
  misc_feature (32)..(714): NCBI GI: 61252390 Blast Desc: CR2AA_BACTX RecName: Full=Pesticidal crystal protein cry2Aa; AltName: Full=71 kDa crystal protein; AltName: Full=Crystaline entomocidal protoxin; AltName: Full=Insecticidal
  misc_feature (32)..(714): NCBI GI: 27447952 Blast Desc: AF252262_3 insecticidal crystal protein Cry2Aa [Bacillus thuringiensis]
  misc_feature (32)..(714): NCBI GI: 4239730 Blast Desc: Cry2Aa protein [Bacillus thuringiensis]
  misc_feature (32)..(714): NCBI GI: 47678765 Blast Desc: insecticidal crystal protein Cry2Aa [Bacillus thuringiensis serovar kurstaki]
  misc_feature (32)..(714): NCBI GI: 4239728 Blast Desc: Cry2Aa protein [Bacillus thuringiensis]
  misc_feature (32)..(714): NCBI GI: 114848912 Blast Desc: insecticidal crystal protein Cry2Aa [Bacillus thuringiensis]
  misc_feature (32)..(714): NCBI GI: 129307220 Blast Desc: Cry2Af1 [Bacillus thuringiensis]
  misc_feature: Useful for conferring pesticidal activity to an organism
  misc_feature: Useful for controlling a pest organism
MVNNTNDDLEVSDTTSITNDNLEVNDATSITNDNLNSSVISPYDELPYNVLTEPLYTKSLEEIKEYWGNWGETDPSIFIPPVVGSIGSMLAKKIAGLLADRALKKLFEWLFPQDKPLTMEEILRATEELVNRKITELVRQQVNAELIGFINAIKAFEEDINSFGVYDSEDSGVLESTFKYNRTGIYSPPEPKAAIDSINTLNLIFTQRMPQFQLSDWKVELLPLFAQAANLHLFFIRDVIDNAEKWNLSAADVTRYKNRLKDYTKTYSNYAISTYKSAFQSKFPGRLFNILQFRTFMTLGVLDYVSIWSMLRFDKVSINSSSNLYSVGDYSASQGEIPTYTLANWGYLHRLFQGRPNKVLNALSGQYLSFYQQGKIINHQLYLPTTDIDTLFKVTTSYMNSTPISIGGTAPSQPGPLPSPGDYYRIGNPSISLNTLAYPLTHSFLGYRHIKQLGYPGFPGLFVSKSSFGFRNTAATHWMTPTSSGSITYNYPDYYVRNFTGVLRSTQISSEAINLINGPSSVNLGYNESLWGAVSTHTRGGFMSHTNNGSFKHDIPYGSTGANPIGLTISALQFDQVRNNDGKNNQIVIHERFGNLGDAVNLPANSSGKSNYIQYTIRNRGHITKTYKLYVKLSTMGETTINFWFNGGLYSTKTINTRTTNEGIDDNGQYSQYVNFGNCTLSRETDNTIGLGIYGAQTFIGQIILVPLDVTPIYE

SEQ ID NO: 197 - DNA, 2790 bp, Bacillus sp.
  misc_feature: SGI cDNA ID NO. AGRMET1G219034
  misc_feature: Encodes the peptide sequence at SEQ ID NO. 198
  misc_feature: Useful for conferring pesticidal activity to an organism
  misc_feature: Useful for controlling a pest organism
atgaaaacaaatgagcaacaactgaaagtttacgcatcaccatcagatagtataattggatctagtattgataacattgatatatataaacaatttatagctgaagattataaagaattattttcaagtacaccgcctccaaacgaaacagatgatacatggatattaattgctaaaaacgtaatcgcaacaggtattggtattgcagccgctgttgcaacaggaggaaacgcggctgtaggaggagcggcatactctattgttaatggtgtagcaggattcttttttgatatgaaaacaatcggctccaccccttcacaaatttgggagcaaataaagatttactctgaaaatttcttgaatgaaaaaatggacgagcatatatttgaagaaaggttagctgaattatcgggtatagctaatgaaattaaggactacaaagactacttgaaaaaaaattcacctgtagctgaacaaaaatgtcgaaatgttctttcattaagctccctatgcctggcaaaactccagatgcgagagaaaagagttctattattaccaatttacacacagctagctgttttgcatcttttgatgtatcgtgatttatgcttgtttggtaaacaatggggtgtaagtgatagcgaccacaaaatagatcagcaaaaattcaaacagaatttacaagctcattataagtacatcagagaagtttattatgaagggttggaagaaagaaaggtaaaaccaataccttatgataaagcagagtacaagccttttattaaagataatgctgatcatgaagtttatgggtcgacagcaagatggaattatgtcaatgcatataaaactttaatgcaaacatcagtatttgatcaaataatgcatgtatttcccttcgtaagaggagattatgattatataataaatcctatacaaaagtcagctagtcgaatatatgctcccatctcaggcgttgtgcgcacaaatactccaaactcattaacagaaatggaaaaattggtagctcaatatctatatgatggagaattgatggcagtagaaacggtttctaacacgcaaagggctggttcttatcagctgagtaaatggggtatatctggaacaagacaaaaaataaatcatactggaataagtagttggctcccttattgggacggtgaaaatggcggtgatgccaatgcagagagagcgacagtgtattgtagttctttattcccaattacgactttagcggtggcaaattctctaattccagaagaatttatggcatcaggttctataccaatagtcaactcgtatcataatggtacacctacaaagacaacatttatgtatgaaaatagacaatctatatcagttggtcctagaagtcctctattttcaattattctatcagaaggatatggaacgccatatagaaatacagagtgtaaatataaaggctataaactacatgcaatgaagactctacagtataaaaaagatggtgtagaagaattaaggcagccaggggttactgattcttatggagacaatatgagcgcgggtatgctatttacttttataccgaatctaaacccaaaacacatcttacatccttatcgaacgcttttaatatcagctcaatatcattgtaaacaaaataatacactatttgtagaggaaccactaaatggtcaaaaggcaattcattttagaaatacagattcatttgtagaatataaggtatactcacctgtagaaaatgcaaagttcgatatgtttttcagatatgcttatgctggagcaaaatctagtatgaatataaaagtgaatggagtaaatcgatcatctcttacgttagaaaatactacagaaaatgatacgatgccagatgaaaatagagaaggttttaaaggagaaaatggaacttataagtataaagaaatttctcagatagtgacgttaaaaaagggggaaaatattattacattaaataattctccttcaaacgtatacctagaccaaattggatttgtaccgatgccattgggtgttgaagaggtacttggtacagatggaaaggtttatatttcgataagtgagaacggtaagttggtggcacgatctgaaaatggaaatagacctcttggttctagtgataagaattgggatatatatgtaaacgagggtaaaatatctgtcttaacggttagtggatcgactactgcagatactgttgtaagcatgcttaacaagcgtttagcgcaagtatcaggtttttggatagtagattctaaaacgaaacctgtagccctgcatcaaattaaggatgttgataatagtggagcatatataactttttcgagggtaaacgaacatatctttgcagtatccaacacatcaaatggtcgttatggtaataataagaataataaatctgagatatatgtaggtggagtacttcagtacagtattagggaaactgattcatttggtgttctagaaacggcatttaataacttaaatgtgaaaggaggtacgtttaaagtagtacctgttttgagtaatgggacttcaatttctcatttcgacaaagcgagtgattacatttacaatttatttgccactgaaaataatgtaattaactataataaactagcaccaaatgtatctatatatgatgttgaagtagctgataatgcattagatgtagccaacgcgcgtggtaatgcgctattaacaggtcttgtatcatcagctaggaaattagtaccgacaaactaa

SEQ ID NO: 198 - protein, 929 aa, Bacillus sp.
  misc_feature: SGI Peptide ID NO. AGRMET1T219034
  misc_feature (63)..(294): Pfam Id: PF03945 Pfam Desc: delta endotoxin, N-terminal domain
  misc_feature (554)..(683): Pfam Id: PF03944 Pfam Desc: delta endotoxin
  misc_feature (106)..(683): NCBI GI: 229065811 Blast Desc: 83-kDa crystal protein [Bacillus cereus AH603] gi|228715456|gb|EEL67276.1| 83-kDa crystal protein [Bacillus cereus AH603]
  misc_feature (58)..(246): NCBI GI: 163943265 Blast Desc: Delta endotoxin central region subgroup 1 [Bacillus weihenstephanensis KBAB4] gi|163865462|gb|ABY46520.1| Delta endotoxin central region subgroup 1 [Bacillus weihenstephanensis
  misc_feature (106)..(683): NCBI GI: 308756031 Blast Desc: cry protein [Bacillus thuringiensis]
  misc_feature (56)..(334): NCBI GI: 228911584 Blast Desc: Pesticidal crystal protein cry1Bc [Bacillus thuringiensis IBL 200] gi|8927997|sp|Q9XDL1.1|CR1ID_BACTU RecName: Full=Pesticidal crystal protein cry1Id; AltName: Full=81
  misc_feature (52)..(299): NCBI GI: 19386614 Blast Desc: mosquitocidal toxin [Bacillus thuringiensis serovar aizawai]
  misc_feature (108)..(327): NCBI GI: 51090236 Blast Desc: cancer cell-killing Cry protein [Bacillus thuringiensis]
  misc_feature (108)..(327): NCBI GI: 51090228 Blast Desc: cancer cell-killing Cry protein parasporin-3 [Bacillus thuringiensis] gi|51090232|dbj|BAD35160.1| cancer cell-killing Cry protein parasporin-3 [Bacillus thuringiensis]
  misc_feature (56)..(215): NCBI GI: 1621216 Blast Desc: Bt toxin [Bacillus thuringiensis]
  misc_feature (56)..(215): NCBI GI: 55583756 Blast Desc: delta endotoxin [Bacillus thuringiensis]
  misc_feature (56)..(215): NCBI GI: 256003036 Blast Desc: Cry1Ia-like protein [Bacillus thuringiensis]
  misc_feature: Useful for conferring pesticidal activity to an organism
  misc_feature: Useful for controlling a pest organism
MKTNEQQLKVYASPSDSIIGSSIDNIDIYKQFIAEDYKELFSSTPPPNETDDTWILIAKNVIATGIGIAAAVATGGNAAVGGAAYSIVNGVAGFFFDMKTIGSTPSQIWEQIKIYSENFLNEKMDEHIFEERLAELSGIANEIKDYKDYLKKNSPVAEQKCRNVLSLSSLCLAKLQMREKRVLLLPIYTQLAVLHLLMYRDLCLFGKQWGVSDSDHKIDQQKFKQNLQAHYKYIREVYYEGLEERKVKPIPYDKAEYKPFIKDNADHEVYGSTARWNYVNAYKTLMQTSVFDQIMHVFPFVRGDYDYIINPIQKSASRIYAPISGVVRTNTPNSLTEMEKLVAQYLYDGELMAVETVSNTQRAGSYQLSKWGISGTRQKINHTGISSWLPYWDGENGGDANAERATVYCSSLFPITTLAVANSLIPEEFMASGSIPIVNSYHNGTPTKTTFMYENRQSISVGPRSPLFSIILSEGYGTPYRNTECKYKGYKLHAMKTLQYKKDGVEELRQPGVTDSYGDNMSAGMLFTFIPNLNPKHILHPYRTLLISAQYHCKQNNTLFVEEPLNGQKAIHFRNTDSFVEYKVYSPVENAKFDMFFRYAYAGAKSSMNIKVNGVNRSSLTLENTTENDTMPDENREGFKGENGTYKYKEISQIVTLKKGENIITLNNSPSNVYLDQIGFVPMPLGVEEVLGTDGKVYISISENGKLVARSENGNRPLGSSDKNWDIYVNEGKISVLTVSGSTTADTVVSMLNKRLAQVSGFWIVDSKTKPVALHQIKDVDNSGAYITFSRVNEHIFAVSNTSNGRYGNNKNNKSEIYVGGVLQYSIRETDSFGVLETAFNNLNVKGGTFKVVPVLSNGTSISHFDKASDYIYNLFATENNVINYNKLAPNVSIYDVEVADNALDVANARGNALLTGLVSSARKLVPTN

SEQ ID NO: 199 - DNA, 1698 bp, Bacillus sp.
  misc_feature: SGI cDNA ID NO. AGRMET1G697771
  misc_feature: Encodes the peptide sequence at SEQ ID NO. 200
  misc_feature: Useful for conferring pesticidal activity to an organism
  misc_feature: Useful for controlling a pest organism
atgaaatacaaagatcgaaaagatgcaaagcgtaaatataaacaagcgcttcttgcaacagttgcaactatgacgttaggagtaagcacattaggaagtacagcttctgcatttgctgaggaaaaggcaacagaagcacaacaagaagaacaagctgccacggattcgttaggtgctggtggtggtgctattcctgatgattccctgattaacaccaatccaatcgcgcagtttgataaatggacacaagatcttggaaaaaaaacaggggcagcaaattacaaaaccacactttctgcagcagaaaagataatgccaacacttattaaagatatcaaaaaagacaactacaacaattctcttagggccgtgacgatgttcggtacggcgctgattccctatggaggatcctttatttctccattaattggtttaatatggccagaaagcaaggatgatgattcgctcaagctgaaaaaacaactagacgacctgaggaaagaactttcgagcctaataaatgaggaaattgacacgttcgatcaagagacaatccaatcagcggctaatgtaatcaacaaaaaccttaaaaaattagaggacggcatagcagggaaaactccaggtattttttatgatagtcagagcggttttactgtagcatacagtattaacagcgcatttgaggtgcttctagctaatgcttccaagccaagcttcaaaatgcaggagcttcctttgtacactagtcttgcagctgcccacttacaattcttagaattcctgaaacaaaatggaaaaaaccctaaactcgccttgaccgatgtgaattataatgacttcgtaagcaagattgctgaaaaaactccagaatatacccaacatatagaggacacatatactcaatttcgcggcaaaattgagcaaaagatgacacctctactacaaggtgtaataggcgttacttctgatgaacagcaaaatttaggagctgctttcgacaagaccattgagctgcagcgaaaagcggtacaattaatgggaggggacgcgctaggtctaaacagtaaatacaaacagaggttacaaacatttatagacaataaggaaaattataaaaagttaatggaaacaaaaagcgactattacaatagtacagtcgggttattcgcgataactcaggggataccatcaaaaatacaaaaacctgaaacaacacctacatgggagcgccttaaaacactacaaggaccagtagcggatggaacttacaaaatagtgtccaaattagattcttctatgctattagataatgattatacaaaaaatcgacgagcacaattaaataaggattatactgatataaaagaggaatgggttgacggtgaaaagtggatgctcagatataataaagataagaaagcttataaaatcataaatcaaaaagcgccacatgatgaattagccgttaatgggcaagatgatactgtctttgctgcaactgaccgtaataataacgacgagcgttattggacactcgaggatgcagaaaatggctatttctttattaaaaataaagcatctggtcgagtattggatgtaacagacggaagcacagccgctggtacagatataaaaacacatgcccaaaatacacctgctgtagcagcacagctgttcaaatttgaaccatattaa

SEQ ID NO: 200 - protein, 565 aa, Bacillus sp.
  misc_feature: SGI Peptide ID NO. AGRMET1T697771
  misc_feature (128)..(302): Pfam Id: PF03945 Pfam Desc: delta endotoxin, N-terminal domain
  misc_feature (423)..(548): Pfam Id: PF00652 Pfam Desc: Ricin-type beta-trefoil lectin domain
  misc_feature (390)..(547): NCBI GI: 51090240 Blast Desc: Cry protein [Bacillus thuringiensis]
  misc_feature (412)..(545): NCBI GI: 228937264 Blast Desc: bthur0009_56310 [Bacillus thuringiensis serovar andalousiensis BGSC 4AW1] gi|228822405|gb|EEM68354.1| bthur0009_56310 [Bacillus thuringiensis serovar andalousiensis
  misc_feature (418)..(545): NCBI GI: 228936898 Blast Desc: Cancer cell-killing Cry protein [Bacillus thuringiensis serovar andalousiensis BGSC 4AW1] gi|228822789|gb|EEM68667.1| Cancer cell-killing Cry protein BGSC
  misc_feature (422)..(548): NCBI GI: 229119395 Blast Desc: mosquitocidal toxin protein [Bacillus cereus Rock1-3] gi|228664073|gb|EEL19614.1| mosquitocidal toxin protein [Bacillus cereus Rock1-3]
  misc_feature (422)..(548): NCBI GI: 228903967 Blast Desc: mosquitocidal toxin protein [Bacillus thuringiensis IBL 4222] gi|228855685|gb|EEN00236.1| mosquitocidal toxin protein [Bacillus thuringiensis IBL 4222]
  misc_feature (422)..(548): NCBI GI: 75761624 Blast Desc: MOSQUITOCIDAL TOXIN PROTEIN [Bacillus thuringiensis serovar israelensis ATCC 35646] gi|74490889|gb|EAO54154.1| MOSQUITOCIDAL TOXIN PROTEIN [Bacillus thuringiensis serovar ATCC
  misc_feature (418)..(563): NCBI GI: 256421893 Blast Desc: glycoside hydrolase family protein [Chitinophaga pinensis DSM 2588] gi|256036801|gb|ACU60345.1| glycoside hydrolase family 43 [Chitinophaga pinensis DSM 2588]
  misc_feature (418)..(545): NCBI GI: 51090228 Blast Desc: cancer cell-killing Cry protein parasporin-3 [Bacillus thuringiensis] gi|51090232|dbj|BAD35160.1| cancer cell-killing Cry protein parasporin-3 [Bacillus thuringiensis]
  misc_feature (411)..(564): NCBI GI: 161598653 Blast Desc: hemagglutinin-related protein [Bacillus thuringiensis serovar israelensis] gi|228904966|ref|ZP_04069016.1| bthur0014_60870 [Bacillus thuringiensis IBL 4222] protein serovar
  misc_feature (419)..(562): NCBI GI: 228911666 Blast Desc: bthur0013_57890 [Bacillus thuringiensis IBL 200] gi|228847990|gb|EEM92867.1| bthur0013_57890 [Bacillus thuringiensis IBL 200]
  misc_feature: Useful for conferring pesticidal activity to an organism
  misc_feature: Useful for controlling a pest organism
MKYKDRKDAKRKYKQALLATVATMTLGVSTLGSTASAFAEEKATEAQQEEQAATDSLGAGGGAIPDDSLINTNPIAQFDKWTQDLGKKTGAANYKTTLSAAEKIMPTLIKDIKKDNYNNSLRAVTMFGTALIPYGGSFISPLIGLIWPESKDDDSLKLKKQLDDLRKELSSLINEEIDTFDQETIQSAANVINKNLKKLEDGIAGKTPGIFYDSQSGFTVAYSINSAFEVLLANASKPSFKMQELPLYTSLAAAHLQFLEFLKQNGKNPKLALTDVNYNDFVSKIAEKTPEYTQHIEDTYTQFRGKIEQKMTPLLQGVIGVTSDEQQNLGAAFDKTIELQRKAVQLMGGDALGLNSKYKQRLQTFIDNKENYKKLMETKSDYYNSTVGLFAITQGIPSKIQKPETTPTWERLKTLQGPVADGTYKIVSKLDSSMLLDNDYTKNRRAQLNKDYTDIKEEWVDGEKWMLRYNKDKKAYKIINQKAPHDELAVNGQDDTVFAATDRNNNDERYWTLEDAENGYFFIKNKASGRVLDVTDGSTAAGTDIKTHAQNTPAVAAQLFKFEPY

SEQ ID NO: 201 - DNA, 2055 bp, Bacillus sp.
  misc_feature: SGI cDNA ID NO. AGRMET1G219087
  misc_feature: Encodes the peptide sequence at SEQ ID NO. 202
  misc_feature: Useful for conferring pesticidal activity to an organism
  misc_feature: Useful for controlling a pest organism
atgggggagtgtaaaatgaagtataaagatagaatatcagcaaaacgtagatttaaaaaagcggtacttattgctgctacaacaataacgttagggttgagtacagcgggcggtactacttctgtatttgcggaggaaacttctacacaaaaatttgaaataaatccagatggatctataaagattttggaaaataacccgactcttcagaatttagtgacggatttgagtggccctcttttcaaggaagctgtactaactgggaactctagtatacaagatttacaaaatttaggtaaacatctggcgttagcatctagcggattgctgccatttggaggatcatttgtttatgaattcatcagtgcggtatggccggatgcgggaccaagtcagatggatttaatcatgaaaacagttcctgcaatgatagatgagaaaattaaccaatatgatcttgattccattcaatcggatatggaaacccttagggacgaattaaaagtttttgaaagatcaattaataacgcaccgaagaatataccaagtggagctcaagctgctccaggtgatatacagaggagtaaccaagaattagcaaaagatattaatagattatttaaaagtcttataaatacatgtcgaaaatcgggtcaaaaagaagcagagcttcctttttacactgctgttgcaacttctcatttgcaatttttgagatttatggaacttaatgcgcaatcacaccctagactaaaaatggaaccggaggttttagatcaacttttttcggagcccttaaaggtaattgcccaaggttataaaaagcatataaatgaaacatctcagtctgctcagaaaaaaatctattcaaagatgaacagtataatagatgttagtattaatccgctagaaaatcttgatcatatgtatgtacctagaggtgttccaactccgaattatgttgataagaaaatagaggaattacaaacagattatacaaatttattcaataatatgcatgcttatgcctatgtaacagagaataacgaggcatttaagataatttcagagtctattatcggtaaggaaatgcttcacatgggatcagcgggaaatgtaactattaacgtgaaagatcaaaatggtcttgctaaatatcttactgcaaagtccgatctttctcaagtgcattgtgagggacgttctgcaggtagcgaacaagaatttatgtttgaatctgtaaatgcagaagaaaatatatttgcattaaaatcaaaaataaatgggcattatgcaacatttgattactcatataaaaagataccaggtttgggaagttttgatgcgacggataaaaatgataaaagaacacatgttaaattaatctcactaggaaacaataagtatgcaatgagatcaatctatgatgacaataattttatttatgctgatttcaatcatgggggcgctttaactgcacatagtaagtatattggcgattgggaaacattcgaaataagagggacaggaggggattcaattgcgagttctactttgatgccgtcgtcagcagacttatatacatcagaagcgtatcaatatcagtctgttttaccacctgaaggaaatgccaaaactgcatcagacattacgtttggtcaatttaaattcagtccagaagtaggaaaattgaatccatatacggatcatatttataaggctggtgttggtgaattcattgatgttttacaacttgttccttcccattctcaggctaaaacttctataaatttaactggtcttgaaaaaaatacaaagtacacattacgtgtatctatgagagtgatggaggtaggtaataacggacaaaaggtacaattagatttcgcaaataaagaaaagaaagaatttactgtaaaaggaagcggaccgaacgaattgtatcaggatattgaactaccgtttactacaggtgataatcctgtgggtgctgatggaacagcgagcattacggtggatggagctaaggaaatgtttattaaagaggttaaagtt

SEQ ID NO: 202 - protein, 685 aa, Bacillus sp.
  misc_feature: SGI Peptide ID NO. AGRMET1T219087
  misc_feature (109)..(246): Pfam Id: PF03945 Pfam Desc: delta endotoxin, N-terminal domain
  misc_feature (110)..(239): NCBI GI: 301641366 Blast Desc: delta endotoxin [Bacillus thuringiensis]
  misc_feature (110)..(239): NCBI GI: 12003323 Blast Desc: AF211190_1 Cry1I [Bacillus thuringiensis]
  misc_feature (99)..(294): NCBI GI: 228911585 Blast Desc: Pesticidal crystal protein cry1Ae [Bacillus thuringiensis IBL 200] gi|228848088|gb|EEM92953.1| Pesticidal crystal protein cry1Ae [Bacillus thuringiensis IBL 200]
  misc_feature (99)..(294): NCBI GI: 117529 Blast Desc: CR1DA_BACTA RecName: Full=Pesticidal crystal protein cry1Da; AltName: Full=132 kDa crystal protein; AltName: Full=Crystaline entomocidal protoxin; AltName: Full=Insecticidal
  misc_feature (99)..(288): NCBI GI: 258558936 Blast Desc: Cry1Da [Bacillus thuringiensis]
  misc_feature (97)..(292): NCBI GI: 281210769 Blast Desc: PPL_01928 [Polysphondylium pallidum PN500]
  misc_feature (110)..(239): NCBI GI: 347810680 Blast Desc: Cry1I crystal toxin protein [Bacillus thuringiensis] gi|347810682|gb|AEP25410.1| Cry1I crystal toxin protein [Bacillus thuringiensis] gi|347810684|gb|AEP25411.1| Cry1I crystal toxin
  misc_feature (110)..(239): NCBI GI: 316931340 Blast Desc: crystal protein [Bacillus thuringiensis]
  misc_feature (110)..(239): NCBI GI: 300492624 Blast Desc: Cry1I toxin Crystal protein [Bacillus thuringiensis]
  misc_feature (83)..(239): NCBI GI: 61252386 Blast Desc: CR1CA_BACTE RecName: Full=Pesticidal crystal protein cry1Ca; AltName: Full=134 kDa crystal protein; AltName: Full=Crystaline entomocidal protoxin; AltName: Full=Insecticidal
  misc_feature: Useful for conferring pesticidal activity to an organism
  misc_feature: Useful for controlling a pest organism
MGECKMKYKDRISAKRRFKKAVLIAATTITLGLSTAGGTTSVFAEETSTQKFEINPDGSIKILENNPTLQNLVTDLSGPLFKEAVLTGNSSIQDLQNLGKHLALASSGLLPFGGSFVYEFISAVWPDAGPSQMDLIMKTVPAMIDEKINQYDLDSIQSDMETLRDELKVFERSINNAPKNIPSGAQAAPGDIQRSNQELAKDINRLFKSLINTCRKSGQKEAELPFYTAVATSHLQFLRFMELNAQSHPRLKMEPEVLDQLFSEPLKVIAQGYKKHINETSQSAQKKIYSKMNSIIDVSINPLENLDHMYVPRGVPTPNYVDKKIEELQTDYTNLFNNMHAYAYVTENNEAFKIISESIIGKEMLHMGSAGNVTINVKDQNGLAKYLTAKSDLSQVHCEGRSAGSEQEFMFESVNAEENIFALKSKINGHYATFDYSYKKIPGLGSFDATDKNDKRTHVKLISLGNNKYAMRSIYDDNNFIYADFNHGGALTAHSKYIGDWETFEIRGTGGDSIASSTLMPSSADLYTSEAYQYQSVLPPEGNAKTASDITFGQFKFSPEVGKLNPYTDHIYKAGVGEFIDVLQLVPSHSQAKTSINLTGLEKNTKYTLRVSMRVMEVGNNGQKVQLDFANKEKKEFTVKGSGPNELYQDIELPFTTGDNPVGADGTASITVDGAKEMFIKEVKV

SEQ ID NO: 203 - DNA, 2205 bp, Bacillus sp.
  misc_feature: SGI cDNA ID NO. AGRMET1G218636
  misc_feature: Encodes the peptide sequence at SEQ ID NO. 204
  misc_feature: Useful for conferring pesticidal activity to an organism
  misc_feature: Useful for controlling a pest organism
ttgaatcgcttgaaattaaatgaaaataaaaaaggagagtttacgatgataaaatataaaaatcgaaaaaaagcaaggcgtaaatataaacaagctttagttacaactgttgcagcaatgactttaagtttaagcattggtagcagtttttctgtaaatcctacagctgtatatgctgctgaaagttcttcacaaggttttaaaattataaataatacgatattgattgcaagtaatccggatactcaagcagtagtttccactttgattggccccagtcttgttgatttaattaaaaatggaaatgtgagtaatacaaattttgaaaacggcctaaagaatgtagcatttggtgcgatagcaatgattccatatggaggcacattcgtttcgtcaatacttagtatgttatggccatctgaagataattcagcacaaaaaatggtagaagaaattatgaaacaagttgatgagttaattgaccaaaaacttattgataaagatttagtagatcttgattcagacataagaggattacaaaaagcgctagccgattatgaaaggtctgtgaatccttatgatggtgaagatcattcaaaagaaacgaataagtctcgtgcagtattagttaaaagtaaattcgaaacaatgttagaaaaatgttcaaaaaagggatatgaggaatcagaacttcctttattcacatctgtggctactgcttatttaacattcttagaatttttaaaaataaatggagaaggtcctatatttggtatggataagacaacgtatgctagctacgttacaaatctaagtggatttagaaatcatacaaaaactactaatcttcaaggacttgcggaagaatataaacaatacatacatgatacaggtacaagcgcgactgataaattaattaataaagctaaatctatagcaagacgaagttcaaggatacagccaacacaaagttttgtcgatactcgttctgtttctgggatttctgcatatttaaatgacaattttaaagaattacaaagactaaatagcatatataatgataaatctcctgcagctaaggtaaatgatatgatgcctgcgacaaatgctgaagttaataaagcacgtcaagttttaaatgattttaatgcagtagcagaaaaattggatatttataataaaacaacattgtataataaagctttttatgcagtttcggaagctatttctccagtactcacggatacaaacatggaatcacagataaaagaaaaatttgcagcaatggaaccttctatagaagatcttaaaataataaaggatgacattgtttctactaaaattgcattctcatcagcagaacaagctagtaaaaacttgattacgacggaaattccaacagcaatactaccgctggatagttttactaagaagggcgacggatcttatgaatcttttggggatgagtatatattaggcacatatgatggtagttttcaatctggtataactgcagttttacctaagcttgaaaaaaataagaagtataaactggttgtaaatgcaaaagttcaaaatcctgctgcttcacaaggagttaaactagattttgcaaacaagcaatcaaaagaattcattttaaatggtgagaattatcaaaaacttgaattagcgtttactacggatgagaatctgacaggtgataatgcaagaattaacatgttattaaagaattcaggtatgccattaattattaacggtgtagaagtttttgatgaaggtccttctatgaatcaactagaggaaaaaacaattagtgatgctaatagagttgctttgaatgaatttgtttctgagctaggagattattttaaagatcatgattgttatggtcttacgcctgcctcttctcctagatatgatggagtttacgctaatatatataaaagtttaactaatcttgaaaaaaataagcaatataaattggctgtaaagttaagaacatttggcagtgtagcaaaagtaaaattagattttgcaaataaacaatcaaaagaatttactctaaatggtgatcagatgcaaacacttgaattaccttttactacggacaataatccaacaggtgctaatggagcaataggtatttcagtaatgaaccaggacgcagtgttaattcaagaggttggagttatttctctataa

SEQ ID NO: 204 - protein, 734 aa, Bacillus sp.
  misc_feature: SGI Peptide ID NO. AGRMET1T218636
  misc_feature (123)..(271): Pfam Id: PF03945 Pfam Desc: delta endotoxin, N-terminal domain
  misc_feature (119)..(252): NCBI GI: 8469161 Blast Desc: CR3CA_BACTK RecName: Full=Pesticidal crystal protein cry3Ca; AltName: Full=73 kDa crystal protein; AltName: Full=Crystaline entomocidal protoxin; AltName: Full=Insecticidal
  misc_feature (105)..(305): NCBI GI: 281202736 Blast Desc: PPL_09690 [Polysphondylium pallidum PN500]
  misc_feature (112)..(245): NCBI GI: 90578253 Blast Desc: Twin-arginine translocation pathway signal [Vibrio angustum S14] gi|90441339|gb|EAS66519.1| Twin-arginine translocation pathway signal [Vibrio angustum S14]
  misc_feature (112)..(246): NCBI GI: 255036083 Blast Desc: delta endotoxin domain-containing protein [Dyadobacter fermentans DSM 18053] gi|254948839|gb|ACT93539.1| delta endotoxin domain protein [Dyadobacter fermentans DSM 18053]
  misc_feature (126)..(279): NCBI GI: 306977643 Blast Desc: crystal protein [Bacillus thuringiensis]
  misc_feature (126)..(301): NCBI GI: 219937708 Blast Desc: crystal protein [Bacillus thuringiensis]
  misc_feature (92)..(372): NCBI GI: 308756031 Blast Desc: cry protein [Bacillus thuringiensis]
  misc_feature (72)..(253): NCBI GI: 269103373 Blast Desc: delta endotoxin [Photobacterium damselae subsp. damselae CIP 102761] gi|268163271|gb|EEZ41767.1| delta endotoxin [Photobacterium damselae subsp. damselae CIP 102761]
  misc_feature (123)..(260): NCBI GI: 163943265 Blast Desc: Delta endotoxin central region subgroup 1 [Bacillus weihenstephanensis KBAB4] gi|163865462|gb|ABY46520.1| Delta endotoxin central region subgroup 1 [Bacillus weihenstephanensis
  misc_feature (126)..(301): NCBI GI: 219939439 Blast Desc: crystal protein cry2Ad4 [Bacillus thuringiensis]
  misc_feature: Useful for conferring pesticidal activity to an organism
  misc_feature: Useful for controlling a pest organism
MNRLKLNENKKGEFTMIKYKNRKKARRKYKQALVTTVAAMTLSLSIGSSFSVNPTAVYAAESSSQGFKIINNTILIASNPDTQAVVSTLIGPSLVDLIKNGNVSNTNFENGLKNVAFGAIAMIPYGGTFVSSILSMLWPSEDNSAQKMVEEIMKQVDELIDQKLIDKDLVDLDSDIRGLQKALADYERSVNPYDGEDHSKETNKSRAVLVKSKFETMLEKCSKKGYEESELPLFTSVATAYLTFLEFLKINGEGPIFGMDKTTYASYVTNLSGFRNHTKTTNLQGLAEEYKQYIHDTGTSATDKLINKAKSIARRSSRIQPTQSFVDTRSVSGISAYLNDNFKELQRLNSIYNDKSPAAKVNDMMPATNAEVNKARQVLNDFNAVAEKLDIYNKTTLYNKAFYAVSEAISPVLTDTNMESQIKEKFAAMEPSIEDLKIIKDDIVSTKIAFSSAEQASKNLITTEIPTAILPLDSFTKKGDGSYESFGDEYILGTYDGSFQSGITAVLPKLEKNKKYKLVVNAKVQNPAASQGVKLDFANKQSKEFILNGENYQKLELAFTTDENLTGDNARINMLLKNSGMPLIINGVEVFDEGPSMNQLEEKTISDANRVALNEFVSELGDYFKDHDCYGLTPASSPRYDGVYANIYKSLTNLEKNKQYKLAVKLRTFGSVAKVKLDFANKQSKEFTLNGDQMQTLELPFTTDNNPTGANGAIGISVMNQDAVLIQEVGVISL

SEQ ID NO: 205 - DNA, 1622 bp, Bacillus sp.
  misc_feature: SGI cDNA ID NO. AGRMET1G697780
  misc_feature: Encodes the peptide sequence at SEQ ID NO. 206
  misc_feature: Useful for conferring pesticidal activity to an organism
  misc_feature: Useful for controlling a pest organism
tctgcatttgctgctgaagaagataatatttcagtaatttcatcgcaccaactcaacgagatcgggacccagacaagcccggaagaaaaagaaaaaggattttggcaaaaagcgggtgctgaattgaatagcaagaatggtaaaaaatttgcaggaacttcattgaaagcatttcttgatttcgcaaaatctggtagtcctgcaagtgcgaacaatgctttaagggcgatagtactagcaggctgtgatttcgttccatatggcatgtttgtatcccctatgattggttatatatggcccgaacaagggggactaaaagaacaactggaaaaactgaaagatgagattaaagacgatacaaaaaaacaaattgcacaacagcatctagataatctgaacacgaattttaaaacccttacagacaatctaacaatgctcgaaagatcagtgaataaggacaatacgagcggaatgtattatagcgacggtgatatatggcaaagtcgacgtacctggataggaataattgagaatagcttcaaaaatattctagaccttgctcaacaacagtcacacaaaatagatgacttgcctttatacactcatgtggcagctgctcatataagctttttaaaaaacttggatcaagatggagcattaggacctaaatataaattggattctagatccttaaatgatttttataacattaataatattcagaatataagtaatgcgtatcagaaatatattacggatacatataacgctgctagcaaagagaaaatcgagaagatagcgcaagtaacaaagaccgattctgcagatgtagagatggatttttatgacgaagaccgaagcaaaacacttaaacaaaaattgaacgaactcaaaactgcagcccaaaataacgtcgaccagatacaccatgcaattgtatatccagggggatgggctgcccataatgaagaactgtctcaagctaccactgccttagacgtcgtgacagacgctttaaatgcagctaactttttatcaaacttgaacgttacgacagttagtaacgtaggattcagttcggcagcaacactaggtaagtggatagaaaagagcggaaagcgctattatactaatattgacgggaatacgatatctggatggatgaaccttggaaattcttcgtattacctcagcgaggaagacaactctaaaggagaattggttactggttggatggatactctgacgcccgataagaaaatcagacgttatctctttagtccggaaaatggtattaaagacggagaactattgaatcaaggagagatggtaactggttgggttgacgctacggacaataacaaggttactgtatcttattacctcagcccggaagaagaaggtataaaaaactctgacggagaactatttactcgaggacagatggtgacgaaatgggtcgaaattgaggatgaaaagactggcaagaaacactggtattacttcaatcctaagatcgacgacgatgcctacggtgaaatgatacggaagcaaaaagcagtacaaatcggtgacaaaaaatatgatttcgattctaatggtgtatgtacaactcctaacgg

SEQ ID NO: 206 - protein, 540 aa, Bacillus sp.
  misc_feature: SGI Peptide ID NO. AGRMET1T697780
  misc_feature (85)..(257): Pfam Id: PF03945 Pfam Desc: delta endotoxin, N-terminal domain
  misc_feature (326)..(505): NCBI GI: 229087444 Blast Desc: Collagenolytic protease [Bacillus cereus Rock3-44] gi|228695866|gb|EEL48717.1| Collagenolytic protease [Bacillus cereus Rock3-44]
  misc_feature (365)..(535): NCBI GI: 335046792 Blast Desc: cell wall-binding repeat protein [Oribacterium sp. oral taxon 108 str. F0425] gi|333760578|gb|EGL38135.1| cell wall-binding repeat protein [Oribacterium sp. oral taxon 108 str.
  misc_feature (349)..(538): NCBI GI: 229007251 Blast Desc: Collagenolytic protease [Bacillus mycoides Rock1-4] gi|228754005|gb|EEM03442.1| Collagenolytic protease [Bacillus mycoides Rock1-4]
  misc_feature (367)..(539): NCBI GI: 302388112 Blast Desc: glycoside hydrolase family 25 [Clostridium saccharolyticum WM1] gi|302198740|gb|ADL06311.1| glycoside hydrolase family 25 [Clostridium saccharolyticum WM1]
  misc_feature (349)..(538): NCBI GI: 228999693 Blast Desc: Collagenolytic protease [Bacillus mycoides Rock3-17] gi|228760055|gb|EEM09025.1| Collagenolytic protease [Bacillus mycoides Rock3-17]
  misc_feature (349)..(538): NCBI GI: 228993655 Blast Desc: Collagenolytic protease [Bacillus pseudomycoides DSM 12442] gi|228766084|gb|EEM14731.1| Collagenolytic protease [Bacillus pseudomycoides DSM 12442]
  misc_feature (367)..(534): NCBI GI: 293189291 Blast Desc: cell wall binding repeat-containing domain protein [Actinomyces odontolyticus F0309] gi|292821754|gb|EFF80690.1| cell wall binding repeat-containing domain protein [Actinomyces
  misc_feature (367)..(534): NCBI GI: 154507613 Blast Desc: ACTODO_00093 [Actinomyces odontolyticus ATCC 17982] gi|153797247|gb|EDN79667.1| ACTODO_00093 [Actinomyces odontolyticus ATCC 17982]
  misc_feature (367)..(536): NCBI GI: 323691666 Blast Desc: HMPREF9475_00790 [Clostridium symbiosum WAL-14673] gi|323504300|gb|EGB20100.1| HMPREF9475_00790 [Clostridium symbiosum WAL-14673]
  misc_feature (367)..(536): NCBI GI: 323486005 Blast Desc: glucan-binding domain-containing protein [Clostridium symbiosum WAL-14163] gi|323400572|gb|EGA92939.1| glucan-binding domain-containing protein [Clostridium symbiosum WAL-14163]
  misc_feature: Useful for conferring pesticidal activity to an organism
  misc_feature: Useful for controlling a pest organism
SAFAAEEDNISVISSHQLNEIGTQTSPEEKEKGFWQKAGAELNSKNGKKFAGTSLKAFLDFAKSGSPASANNALRAIVLAGCDFVPYGMFVSPMIGYIWPEQGGLKEQLEKLKDEIKDDTKKQIAQQHLDNLNTNFKTLTDNLTMLERSVNKDNTSGMYYSDGDIWQSRRTWIGIIENSFKNILDLAQQQSHKIDDLPLYTHVAAAHISFLKNLDQDGALGPKYKLDSRSLNDFYNINNIQNISNAYQKYITDTYNAASKEKIEKIAQVTKTDSADVEMDFYDEDRSKTLKQKLNELKTAAQNNVDQIHHAIVYPGGWAAHNEELSQATTALDVVTDALNAANFLSNLNVTTVSNVGFSSAATLGKWIEKSGKRYYTNIDGNTISGWMNLGNSSYYLSEEDNSKGELVTGWMDTLTPDKKIRRYLFSPENGIKDGELLNQGEMVTGWVDATDNNKVTVSYYLSPEEEGIKNSDGELFTRGQMVTKWVEIEDEKTGKKHWYYFNPKIDDDAYGEMIRKQKAVQIGDKKYDFDSNGVCTTPN

SEQ ID NO: 207 - DNA, 39 bp, Artificial sequence
  PCR primer M13-27F Bac
  misc_feature: Useful for conferring pesticidal activity to an organism
  misc_feature: Useful for controlling a pest organism
tgtaaaacgacggccagttagagtttgatcctggctcag

SEQ ID NO: 208 - DNA, 37 bp, Artificial sequence
  PCR primer 1492R-M13 Bac
  misc_feature: Useful for conferring pesticidal activity to an organism
  misc_feature: Useful for controlling a pest organism
caggaaacagctatgaccggttaccttgttacgactt

What is claimed is:

1. A method for identifying a nucleic acid sequence encoding a biotoxin, said method comprising:
a) generating a mixed population of extrachromosomal DNA molecules from a plurality of microbial isolates;
b) establishing a metagenomic sequence dataset comprising nucleic acid sequences derived from said mixed population of extrachromosomal DNA molecules;
c) processing sequence data of said metagenomic sequence dataset to define at least one nucleic acid sequence contig; and
d) identifying a nucleic acid sequence that encodes a biotoxin by comparing said at least one nucleic acid sequence contig from step (c) with known biotoxin sequences.

2. A method according to claim 1, said method further comprising a step of determining the taxonomic classification of said microbial isolates.

3. A method according to claim 1, wherein said plurality of microbial isolates are pre-selected for the ability to produce at least one biotoxin.

4. A method according to claim 1, said method further comprising a step of determining whether said nucleic acid sequence identified from step (d) encodes a novel biotoxin, wherein the nucleic acid sequence of said novel toxin identified shares less than 30% sequence identity with any known biotoxin sequence.

5. A method of claim 1, wherein said plurality of microbial isolates comprises at least 12 microbial isolates.

6. A method according to claim 1, wherein at least one of said microbial isolates is a bacterium.

7. A method according to claim 6, wherein said bacterium is of a genus selected from the group consisting of Bacillus, Brevibacillus, Clostridia, Paenibacillus, Photorhabdus, Pseudomonas, Serratia, Streptomyces, and Xenorhabdus.

8. A method according to claim 1, wherein said metagenomic sequence dataset is generated by a direct sequencing procedure that excludes molecular cloning.

9. An isolated nucleic acid molecule comprising a nucleic acid sequence identified by a method according to any one of claims 1-8.

10. An isolated nucleic acid molecule comprising:
(a) a nucleic acid sequence hybridizing under high stringency conditions to any one of the nucleotide sequences in the Sequence Listing, a complement thereof or a fragment of either; or
(b) a nucleic acid sequence exhibiting 70% or greater sequence identity to any one of the nucleotide sequences in the Sequence Listing, a complement thereof or a fragment of either; or
(c) a nucleic acid sequence encoding an amino acid sequence exhibiting 50% or greater sequence identity to any one of the amino acid sequences in the Sequence Listing.

11. A nucleic acid construct comprising a nucleic acid molecule according to claim 10, wherein said nucleic acid molecule is operably linked to a heterologous nucleic acid.

12. A host cell comprising a nucleic acid construct according to claim 11.

13. A host cell according to claim 12, wherein said host cell is a plant cell or a microbial cell.

14. A host organism comprising a host cell according to claim 12.

15. A biological sample or progeny derived from a host organism according to claim 14.

16. A method for conferring pesticidal activity to an organism, said method comprising introducing into said organism a nucleic acid molecule according to claim 10, wherein said nucleic acid molecule is transcribed and results in an elevated resistance of said organism to a pest as compared to a control organism.

17. An isolated polypeptide, wherein said polypeptide is encoded by a nucleic acid molecule comprising:
(a) a nucleic acid sequence hybridizing under high stringency conditions to any one of the nucleotide sequences in the Sequence Listing, a complement thereof or a fragment of either; or
(b) a nucleic acid sequence exhibiting 70% or greater sequence identity to any one of the nucleotide sequences in the Sequence Listing, a complement thereof or a fragment of either; or
(c) a nucleic acid sequence encoding an amino acid sequence exhibiting 50% or greater sequence identity to any one of the amino acid sequences in the Sequence Listing.

18. A polypeptide according to claim 17, wherein said polypeptide has pesticidal activity.

19. A composition comprising a polypeptide according to claim 18.

20. A method for controlling a pest, said method comprising contacting or feeding said pest with a pesticidally-effective amount of a polypeptide according to claim 18.
